(19) United States
(12) Patent Application Publication
(10) Pub. No.: US 2023/0357853 A1
(43) Pub. Date: Nov. 9, 2023

(54) SELECTION OF A DOSE FOR RADIOTHERAPY OF A PROSTATE CANCER SUBJECT

(71) Applicant: KONINKLIJKE PHILIPS N.V., EINDHOVEN (NL)

(72) Inventors: RALF DIETER HOFFMANN, BRUEGGEN (DE); MONIQUE STOFFELS, EINDHOVEN (NL)

(21) Appl. No.: 18/022,565

(22) PCT Filed: Aug. 20, 2021
(86) PCT No.: PCT/EP2021/073149

§ 371 Date: Feb. 22, 2023

(30) Foreign Application Priority Data
Aug. 31, 2020 (EP) 20193653.1

(51) Int. Cl. C12Q 1/6886

(52) U.S. Cl. CPC C12Q 1/6886; C12Q 2600/106; C12Q 2600/158

(57) ABSTRACT

The invention relates to a method of selecting a dose for radiotherapy of a prostate cancer subject, comprising determining or receiving the result of a determination of a first gene expression profile for each of one or more immune defense response genes, and/or of a second gene expression profile for each of one or more T-Cell receptor signaling genes, and/or of a third gene expression profile for each of one or more PDE4D7 correlated genes, said first, second and third expression profile(s) being determined in a biological sample obtained from the subject, selecting the radiotherapy dose based on the first gene expression profile(s), or on the second gene expression profile(s), or on the third gene expression profile(s), or on the first, second, and third gene expression profile(s), and, optionally, providing the selection or a therapy recommendation based on the selection to a medical caregiver or the subject.

### FIELD OF THE INVENTION

[0001] The invention relates to a method of selecting a dose for radiotherapy of a prostate cancer subject, and to an apparatus for selecting a dose for radiotherapy of a prostate cancer subject. Moreover, the invention relates to a diagnostic kit, to a use of the kit, to a use of a kit in a method of selecting a dose for radiotherapy of a prostate cancer subject, to a use of first, second, and/or third gene expression profile(s) in a method of selecting a dose for radiotherapy of a prostate cancer subject, and to a corresponding computer program product.

### BACKGROUND OF THE INVENTION

[0002] Cancer is a class of diseases in which a group of cells displays uncontrolled growth, invasion and sometimes metastasis. These three malignant properties of cancers differentiate them from benign tumours, which are self-limited and do not invade or metastasize. Prostate Cancer (PCa) is the second most commonly-occurring non-skin malignancy in men, with an estimated 1.3 million new cases diagnosed and 360,000 deaths world-wide in 2018 (see Bray F. et al., “Global cancer statistics 2018: GLOBOCAN estimates of incidence and mortality worldwide for 36 cancers in 185 countries”, CA Cancer J Clin, Vol. 68, No. 6, pages 394-424, 2018). In the US, about 90% of the new cases concern localized cancer, meaning that metastases have not yet been formed (see ACS (American Cancer Society), “Cancer Facts & Figures 2010”, 2010).

[0003] For the treatment of primary localized prostate cancer, several radical therapies are available, of which surgery (radical prostatectomy, RP) and radiation therapy (RT) are most commonly used. RT is administered via an external beam or via the implantation of radioactive seeds into the prostate (brachytherapy) or a combination of both. It is especially preferable for patients who are not eligible for surgery or have been diagnosed with a tumour in an advanced localized or regional stage. Radical RT is provided to up to 50% of patients diagnosed with localized prostate cancer in the US (see ACS, 2010, ibid).

[0004] After treatment, prostate cancer antigen (PSA) levels in the blood are measured for disease monitoring. An increase of the blood PSA level provides a biochemical surrogate measure for cancer recurrence or progression. However, the variation in reported biochemical progression-free survival (bPFS) is large (see Grimm P. et al., “Comparative analysis of prostate-specific antigen free survival outcomes for patients with low, intermediate and high risk prostate cancer treatment by radical therapy. Results from the Prostate Cancer Results Study Group″, BJU Int, Suppl. 1, pages 22-29, 2012). For many patients, the bPFS at 5 or even 10 years after radical RT may lie above 90%. Unfortunately, for the group of patients at medium and especially higher risk of recurrence, the bPFS can drop to around 40% at 5 years, depending on the type of RT used (see Grimm P. et al., 2012, ibid).

[0005] A large number of the patients with primary localized prostate cancer that are not treated with RT will undergo RP (see ACS, 2010, ibid). After RP, an average of 60% of patients in the highest risk group experience biochemical recurrence after 5 and 10 years (see Grimm P. et al., 2012, ibid). In case of biochemical progression after RP, one of the main challenges is the uncertainty whether this is due to recurring localized disease, one or more metastases or even an indolent disease that will not lead to clinical disease progression (see Dal Pra A. et al., “Contemporary role of postoperative radiotherapy for prostate cancer”, Transl Androl Urol, Vo. 7, No. 3, pages 399-413, 2018, and Herrera F.G. and Berthold D.R., “Radiation therapy after radical prostatectomy: Implications for clinicians”, Front Oncol, Vol. 6, No. 117, 2016). RT to eradicate remaining cancer cells in the prostate bed is one of the main treatment options to salvage survival after a PSA increase following RP. The effectiveness of salvage radiotherapy (SRT) results in 5-year bPFS for 18% to 90% of patients, depending on multiple factors (see Herrera F.G. and Berthold D.R., 2016, ibid, and Pisansky T.M. et al., “Salvage radiation therapy dose response for biochemical failure of prostate cancer after prostatectomy – A multi-institutional observational study”, Int J Radiat Oncol Biol Phys, Vol. 96, No. 5, pages 1046-1053, 2016).

[0006] It is clear that for certain patient groups, radical or salvage RT is not effective. Their situation is even worsened by the serious side effects that RT can cause, such as bowel inflammation and dysfunction, urinary incontinence and erectile dysfunction (see Resnick M.J. et al., “Long-term functional outcomes after treatment for localized prostate cancer”, N Engl J Med, Vol. 368, No. 5, pages 436-445, 2013, and Hegarty S.E. et al., “Radiation therapy after radical prostatectomy for prostate cancer: Evaluation of complications and influence of radiation timing on outcomes in a large, population-based cohort”, PLoS One, Vol. 10, No. 2, 2015). In addition, the median cost of one course of RT based on Medicare reimbursement is $ 18,000, with a wide variation up to about $ 40,000 (see Paravati A.J. et al., “Variation in the cost of radiation therapy among medicare patients with cancer”, J Oncol Pract, Vol. 11, No. 5, pages 403-409, 2015). These figures do not include the considerable longitudinal costs of follow-up care after radical and salvage RT.

[0007] An improved prediction of effectiveness of RT for each patient, be it in the radical or the salvage setting, would improve therapy selection and potentially survival. This can be achieved by 1) optimizing RT for those patients where RT is predicted to be effective (e.g., by dose escalation or a different starting time) and 2) guiding patients where RT is predicted not to be effective to an alternative, potentially more effective form of treatment. Further, this would reduce suffering for those patients who would be spared ineffective therapy and would reduce costs spent on ineffective therapies.

[0008] Numerous investigations have been conducted into measures for response prediction of radical RT (see Hall W.A. et al., “Biomarkers of outcome in patients with localized prostate cancer treated with radiotherapy”, Semin Radiat Oncol, Vol. 27, pages 11-20, 2016, and Raymond E. et al., “An appraisal of analytical tools used in predicting clinical outcomes following radiation therapy treatment of men with prostate cancer: A systematic review”, Radiat Oncol, Vol. 12, No. 1, page 56, 2017) and SRT (see Herrera F.G. and Berthold D.R., 2016, ibid). Many of these measures depend on the concentration of the blood-based biomarker PSA. Metrics investigated for prediction of response before start of RT (radical as well as salvage) include the absolute value of the PSA concentration, its absolute value relative to the prostate volume, the absolute increase over a certain time and the doubling time. Other frequently considered factors are the Gleason score and the clinical tumour stage. For the SRT setting, additional factors are relevant, e.g., surgical margin status, time to recurrence after RP, pre-/peri-surgical PSA values and clinico-pathological parameters.

[0009] Although these clinical variables provide limited improvements in patient stratification in various risk groups, there is a need for better predictive tools.

[0010] A wide range of biomarker candidates in tissue and bodily fluids has been investigated, but validation is often limited and generally demonstrates prognostic information and not a predictive (therapy-specific) value (see Hall W.A. et al., 2016, ibid). A small number of gene expression panels is currently being validated by commercial organizations. One or a few of these may show predictive value for RT in future (see Dal Pra A. et al., 2018, ibid).

[0011] In conclusion, a strong need for better prediction of response to RT as well as for personalization of radiotherapy, for example, selecting a dose for radiotherapy, remains, for primary prostate cancer as well as for the post-surgery setting.

### SUMMARY OF THE INVENTION

[0012] It is an objective of the invention to provide a method of selecting a dose for radiotherapy of a prostate cancer subject, and an apparatus for selecting a dose for radiotherapy of a prostate cancer subject, which allow to apply better salvage radiotherapies. It is a further aspect of the invention to provide a diagnostic kit, a use of the kit, a use of the kit in a method of selecting a dose for radiotherapy of a prostate cancer subject, a use of first, second, and/or third gene expression profile(s) in a method of selecting a dose for radiotherapy of a prostate cancer subject, and a corresponding computer program product.

[0013] In a first aspect of the present invention, a method of selecting a dose for radiotherapy of a prostate cancer subject is presented, comprising:
[0014] determining or receiving the result of a determination of a first gene expression profile for each of one or more, for example, 1, 2, 3, 4, 5, 6, 7, 8, 9, 10, 11, 12, 13 or all, immune defense response genes selected from the group consisting of: AIM2, APOBEC3A, CIAO1, DDX58, DHX9, IFI16, IFIH1, IFIT1, IFIT3, LRRFIP1, MYD88, OAS1, TLR8, and ZBP1, said first gene expression profile(s) being determined in a biological sample obtained from the subject, and/or
[0015] determining or receiving the result of a determination of a second gene expression profile for each of one or more, for example, 1, 2, 3, 4, 5, 6, 7, 8, 9, 10, 11, 12, 13, 14, 15, 16 or all, T-Cell receptor signaling genes selected from the group consisting of: CD2, CD247, CD28, CD3E, CD3G, CD4, CSK, EZR, FYN, LAT, LCK, PAG1, PDE4D, PRKACA, PRKACB, PTPRC, and ZAP70, said second gene expression profile(s) being determined in a biological sample obtained from the subject, and/or
[0016] determining or receiving the result of a determination of a third gene expression profile for each of one or more, for example, 1, 2, 3, 4, 5, 6, 7 or all, PDE4D7 correlated genes selected from the group consisting of: ABCC5, CUX2, KIAA1549, PDE4D, RAP1GAP2, SLC39A11, TDRD1, and VWA2, said third gene expression profile(s) being determined in a biological sample obtained from the subject,
[0017] determining the selection of the radiotherapy dose based on the first gene expression profile(s), or on the second gene expression profile(s), or on the third gene expression profile(s), or on the first, second, and third gene expression profile(s), and
[0018] optionally, providing the selection or a therapy recommendation based on the selection to a medical caregiver or the subject.

[0019] Therefore, in an embodiment the invention relates to a method of selecting a dose for radiotherapy of a prostate cancer subject, comprising:
[0020] determining of a first gene expression profile for each of one or more, for example, 1, 2, 3, 4, 5, 6, 7, 8, 9, 10, 11, 12, 13 or all, immune defense response genes selected from the group consisting of: AIM2, APOBEC3A, CIAO1, DDX58, DHX9, IFI16, IFIH1, IFIT1, IFIT3, LRRFIP1, MYD88, OAS1, TLR8, and ZBP1, said first gene expression profile(s) being determined in a biological sample obtained from the subject, and/or
[0021] determining of a second gene expression profile for each of one or more, for example, 1, 2, 3, 4, 5, 6, 7, 8, 9, 10, 11, 12, 13, 14, 15, 16 or all, T-Cell receptor signaling genes selected from the group consisting of: CD2, CD247, CD28, CD3E, CD3G, CD4, CSK, EZR, FYN, LAT, LCK, PAG1, PDE4D, PRKACA, PRKACB, PTPRC, and ZAP70, said second gene expression profile(s) being determined in a biological sample obtained from the subject, and/or
[0022] determining a determination of a third gene expression profile for each of one or more, for example, 1, 2, 3, 4, 5, 6, 7 or all, PDE4D7 correlated genes selected from the group consisting of: ABCC5, CUX2, KIAA1549, PDE4D, RAP1GAP2, SLC39A11, TDRD1, and VWA2, said third gene expression profile(s) being determined in a biological sample obtained from the subject,
[0023] determining the selection of the radiotherapy dose based on the first gene expression profile(s), or on the second gene expression profile(s), or on the third gene expression profile(s), or on the first, second, and third gene expression profile(s), and
[0024] optionally, providing the selection or a therapy recommendation based on the selection to a medical caregiver or the subject.

[0025] In an alternative embodiment the invention relates to a computer implemented method of selecting a dose for radiotherapy of a prostate cancer subject, comprising:
[0026] receiving the result of a determination of a first gene expression profile for each of one or more, for example, 1, 2, 3, 4, 5, 6, 7, 8, 9, 10, 11, 12, 13 or all, immune defense response genes selected from the group consisting of: AIM2, APOBEC3A, CIAO1, DDX58, DHX9, IFI16, IFIH1, IFIT1, IFIT3, LRRFIP1, MYD88, OAS1, TLR8, and ZBP1, said first gene expression profile(s) being determined in a biological sample obtained from the subject, and/or
[0027] receiving the result of a determination of a second gene expression profile for each of one or more, for example, 1, 2, 3, 4, 5, 6, 7, 8, 9, 10, 11, 12, 13, 14, 15, 16 or all, T-Cell receptor signaling genes selected from the group consisting of: CD2, CD247, CD28, CD3E, CD3G, CD4, CSK, EZR, FYN, LAT, LCK, PAG1, PDE4D, PRKACA, PRKACB, PTPRC, and ZAP70, said second gene expression profile(s) being determined in a biological sample obtained from the subject, and/or
[0028] receiving the result of a determination of a third gene expression profile for each of one or more, for example, 1, 2, 3, 4, 5, 6, 7 or all, PDE4D7 correlated genes selected from the group consisting of: ABCC5, CUX2, KIAA1549, PDE4D, RAP1GAP2, SLC39A11, TDRD1, and VWA2, said third gene expression profile(s) being determined in a biological sample obtained from the subject,
[0029] determining the selection of the radiotherapy dose based on the first gene expression profile(s), or on the second gene expression profile(s), or on the third gene expression profile(s), or on the first, second, and third gene expression profile(s), and
[0030] optionally, providing the selection or a therapy recommendation based on the selection to a medical caregiver or the subject.

[0031] In recent years, the importance of the immune system in cancer inhibition as well as in cancer initiation, promotion and metastasis has become very evident (see Mantuan A. et al., “Cancer-related inflammation”, Nature, Vol. 454, No. 7203, pages 436-444, 2008, and Giraldo N.A. et al., “The clinical role of the TME in solid cancer”, Br J Cancer, Vol. 120, No. 1, pages 45-53, 2019). The immune cells and the molecules they secrete form a crucial part of the tumour microenvironment and most immune cells can infiltrate the tumour tissue. The immune system and the tumour affect and shape one another. Thus, anti-tumour immunity can prevent tumour formation while an inflammatory tumour environment may promote cancer initiation and proliferation. At the same time, tumour cells that may have originated in an immune system-independent manner will shape the immune microenvironment by recruiting immune cells and can have a pro-inflammatory effect while also suppressing anti-cancer immunity.

[0032] Some of the immune cells in the tumour microenvironment will have either a general tumour-promoting or a general tumour-inhibiting effect, while other immune cells exhibit plasticity and show both tumour-promoting and tumour-inhibiting potential. Thus, the overall immune microenvironment of the tumour is a mixture of the various immune cells present, the cytokines they produce and their interactions with tumour cells and with other cells in the tumour microenvironment (see Giraldo N.A. et al., 2019, ibid).

[0033] The principles described above with regard to the role of the immune system in cancer in general also apply to prostate cancer. Chronic inflammation has been linked to the formation of benign as well as malignant prostate tissue (see Hall W.A. et al., 2016, ibid) and most prostate cancer tissue samples show immune cell infiltrates. The presence of specific immune cells with a pro-tumour effect has been correlated with worse prognosis, while tumours in which natural killer cells were more activated showed better response to therapy and longer recurrence-free periods (see Shiao S.L. et al., “Regulation of prostate cancer progression by tumor microenvironment”, Cancer Lett, Vol. 380, No. 1, pages 340-348, 2016).

[0034] While a therapy will be influenced by the immune components of the tumour microenvironment, RT itself extensively affects the make-up of these components (see Barker H.E. et al., “The tumor microenvironment after radiotherapy: Mechanisms of resistance or recurrence”, Nat Rev Cancer, Vol. 15, No. 7, pages 409-425, 2015). Because suppressive cell types are comparably radiation-insensitive, their relative numbers will increase. Counteractively, the inflicted radiation damage activates cell survival pathways and stimulates the immune system, triggering inflammatory responses and immune cell recruitment. Whether the net effect will be tumour-promoting or tumour-suppressing is as yet uncertain, but its potential for enhancement of cancer immunotherapies is being investigated.

[0035] The present invention is based on the idea that, since the status of the immune system and of the immune microenvironment have an impact on therapy effectiveness, the ability to identify markers predictive for this effect might help to be better able to select a dose for radiotherapy.

[0036] The present invention is further based on the idea that, since the known PDE4D7 biomarker has been proven to be a good predictor of radiotherapy response, the ability to identify markers that are highly correlated with the PDE47 biomarker might also help to be better able to select a dose for radiotherapy.

### Immune Response Defense Genes

[0037] The integrity and stability of genomics DNA is permanently under stress induced by various cell internal and external factors like exposure to radiation, viral or bacterial infections, but also oxidation and replication stress (see Gasser S. et al., “Sensing of dangerous DNA”, Mechanisms of Aging and Development, Vol. 165, pages 33-46, 2017). In order to maintain DNA structure and stability, a cell must be able to recognize all types of DNA damages like single or double strand breaks etc. induced by various factors. This process involves the participation of a multitude of specific proteins depending on the kind of damage as part of DNA recognition pathways.

[0038] Recent evidence suggests that mis-localized DNA (e.g., DNA unnaturally appearing in the cytosolic fraction of the cell in contrast to the nucleus) and damaged DNA (e.g., through mutations occurring in cancer development) is used by the immune system to identify infected or otherwise diseased cells while genomic and mitochondrial DNA present in healthy cells is ignored by DNA recognition pathways. In diseased cells, cytosolic DNA sensor proteins have been demonstrated to be involved in the detection of DNA occurring unnaturally in the cytosol of the cell. Detection of such DNA by different nucleic acid sensors translates into similar responses leading to nuclear factor kappa-B (NF-kB) and interferon type I (IFN type I) signalling followed by the activation of innate immune system components. While the recognition of viral DNA is known to induce an IFN type I response, evidence that sensing of DNA damage can initiate immune responses has only recently been accumulating.

[0039] TLR9 (Toll-like receptor 9) located in the endosomes was one of the first DNA sensors molecules identified to be involved in the immune recognition of DNA by signalling downstream via the adaptor protein myeloid differentiation primary-response protein88 (MYD88). This interaction in turn activates mitogen-activated protein kinases (MAPKs) and NF-kB. TLR9 also induces the generation of type I interferons through the activation of IRF7 via IkB Kinase alpha (IKKalpha) in plasmacytoid dendritic cells (pDCs). Various other DNA immune receptors including IFI16 (IFN-gamma-inducible protein 16), cGAS (cyclic DMP-AMP synthase, DDX41 (DEAD-box helicase 41), as well as ZBP1 (Z-DNA-binding protein 1) interact with STING (stimulator of IFN genes), which activates the IKK complex and IRF3 through TBK1 (TANK binding kinase 1). ZBP1 also activates NF-kB via recruitment of RIP1 and RIP3 (receptor-interacting protein 1 and 3, respectively). While the helicase DHX36 (DEAH-box helicase 36) interacts in a complex with TRID to induce NF-kB and IRF-3/7 the DHX9 helicase stimulates MYD88-dependent signalling in plasmacytoid dendritic cells. The DNA sensor LRRFIP1 (leucine-rich repeat flightless-interacting protein) complexes with beta-catenin to activate the transcription of IRF3 whereas AIM2 (absent in melanoma 2) recruits the adaptor protein ASC (apoptosis speck-like protein) to induce a caspase-1-activating inflammasome complex leading to the secretion of interleukin-1beta (IL-1beta) and IL-18 (see FIG. 1 of Gasser S. et al., 2017, ibid, which provides a schematic overview of DNA damage and DNA sensor pathways leading to the production of inflammatory cytokines and the expression of ligands for activating innate immune receptors. Members of the non-homologous end joining pathway (orange), homologous recombination (red), inflammasome (dark green), NF- kB and interferon responses (light green) are shown).

[0040] The factors and mechanisms responsible for activating the DNA sensor pathways in cancer are currently not well elucidated. It will be important to identify the intratumoral DNA species, sensors and pathways implicated in the expression of IFNs in different cancer types at all stages of the disease. In addition to therapeutic targets in cancer, such factors may also have prognostic and predictive value. Novel DNA sensor pathway agonists and antagonists are currently being developed and tested in preclinical trials. Such compounds will be useful in characterizing the role of DNA sensor pathways in the pathogenesis of cancer, autoimmunity and potentially other diseases.

[0041] The identified immune defense response genes AIM2, APOBEC3A, CIAO1, DDX58, DHX9, IFI16, IFIH1, IFIT1, IFIT3, LRRFIP1, MYD88, OAS1, TLR8, and ZBP1, respectively, were identified as follows: A group of 538 prostate cancer patients were treated with RP and the prostate cancer tissue was stored together with clinical (e.g., pathological Gleason grade group (pGGG), pathology state (pT stage)) as well as relevant outcome parameters (e.g., biochemical recurrence (BCR), metastatic recurrence, prostate cancer specific death (PCa death), salvage radiation treatment (SRT), salvage androgen deprivation treatment (SADT), chemotherapy (CTX)). For each of these patients, a PDE4D7 score was calculated and categorized into four PDE4D7 score classes as described in Alves de Inda M. et al., “Validation of Cyclic Adenosine Monophosphate Phosphodiesterase-4D7 for its Independent Contribution to Risk Stratification in a Prostate Cancer Patient Cohort with Longitudinal Biological Outcomes”, Eur Urol Focus, Vol. 4, No. 3, pages 376-384, 2018. PDE4D7 score class 1 represents patient samples with lowest expression levels of PDE4D7, whereas PDE4D7 score class 4 represents patient samples with highest levels of PDE4D7 expression. RNASeq expression data (TPM – Transcripts Per Million) of the 538 prostate cancer subjects was then investigated for differential gene expression between the PDE4D7 score classes 1 and 4. In particular, it was determined for around 20,000 protein coding transcripts whether the mean expression level of the PDE4D7 score class 1 patients was more than twice as high as the mean expression level of the PDE4D7 score class 4 patients. This analysis resulted in 637 genes with a ratio PDE4D7 score class 1 / PDE4D7 score class 4 of > 2 with a minimum mean expression of 1 TPM in each of the four PDE4D7 score classes. These 637 genes were then further subjected to molecular pathway analysis (www.david.ncifcrf.gov), which resulted in a range of enriched annotation clusters. The annotation cluster #2 demonstrated enrichment (enrichment score: 10.8) in 30 genes with a function in defense response to viruses, negative regulation of viral genome replication as well as type I interferon signaling. A further heat map analysis confirmed that these immune defense response genes were generally higher expressed in samples from patients in PDE4D7 score class 1 than from patients in PDE4D7 score class 4. The class of genes with a function in defense response to viruses, negative regulation of viral genome replication as well as type I interferon signaling was further enriched to 61 genes by literature search to identify additional genes with the same molecular function. A further selection from the 61 genes was made based on the combinatorial power to separate patients who died from prostate cancer vs. those who did not, resulting of a preferred set of 14 genes. It was found that the number of events (metastases, prostate cancer specific death) was enriched in sub-cohorts with a low expression of these genes compared to the total patient cohort (#538) and a sub-cohort of 151 patients undergoing salvage RT (SRT) after post-surgical disease recurrence.

### T-Cell Receptor Signaling Genes

[0042] An immune response against pathogens can be elicited at different levels: there are physical barriers, such as the skin, to keep invaders out. If breached, innate immunity comes into play; a first and fast non-specific response. If this is not sufficient, the adaptive immune response is elicited. This is much more specific and needs time to develop when encountering a pathogen for the first time. Lymphocytes are activated by interacting with activated antigen presenting cells from the innate immune system, and are also responsible for maintenance of memory for faster responses upon next encounters with the same pathogen.

[0043] As lymphocytes are highly specific and effective when activated, they are subject to negative selection for their ability to recognize self, a process known as central tolerance. As not all self-antigens are expressed at selection sites, peripheral tolerance mechanisms evolved as well, such as ligation of the TCR in absence of co-stimulation, expression of inhibitory co-receptors, and suppression by Tregs. A disturbed balance between activation and suppression may lead to autoimmune disorders, or immune deficiencies and cancer, respectively.

[0044] T-cell activation can have different functional consequences, depending on the location the type of T-cell involved. CD8+ T-cells differentiate into cytotoxic effector cells, whereas CD4+ T-cells can differentiate into Th1 (IFNγ secretion and promotion of cell mediated immunity) or Th2 (IL4/5/13 secretion and promotion of B cell and humoral immunity). Differentiation towards other, more recently identified T-cell subsets is also possible, for example the Tregs, which have a suppressive effect on immune activation (see Mosenden R. and Tasken K., “Cyclic AMP-mediated immune regulation -Overview of mechanisms of action in T-cells”, Cell Signal, Vol. 23, No. 6, pages 1009-1016, 2011, in particular, FIG. 4, which T-cell activation and its modulation by PKA, and Tasken K. and Ruppelt A., “Negative regulation of T-cell receptor activation by the cAMP-PKA-Csk signaling pathway in T-cell lipid rafts”, Front Biosci, Vol. 11, pages 2929-2939, 2006).

[0045] Both PKA and PDE4 regulated signaling intersect with TCR induced T-cell activation to fine-tune its regulation, with opposing effects (see Abrahamsen H. et al., “TCR- and CD28-mediated recruitment of phosphodiesterase 4 to lipid rafts potentiates TCR signaling”, J Immunol, Vol. 173, pages 4847-4848, 2004, in particular, FIG. 6, which shows opposing effects of PKA and PDE4 on TCR activation). The molecule that connects these effectors is cyclic AMP (cAMP), an intracellular second messenger of extracellular ligand action. In T-cells, it mediates effects of prostaglandins, adenosine, histamine, beta-adrenergic agonists, neuropeptide hormones and beta-endorphin. Binding of these extracellular molecules to GPCRs leads to their conformational change, release of stimulatory subunits and subsequent activation of adenylate cyclases (AC), which hydrolyze ATP to cAMP (see FIG. 6 of Abrahamsen H. et al., 2004, ibid). Although not the only one, PKA is the principal effector of cAMP signaling (see Mosenden R. and Tasken K., 2011, ibid, and Tasken K. and Ruppelt A., 2006, ibid). At a functional level, increased levels of cAMP lead to reduced IFNγ and IL-2 production in T-cells (see Abrahamsen H. et al., 2004, ibid). Aside from interfering with TCR activation, PKA has many more effector (see FIG. 15 of Torheim E.A., “Immunity Leashed – Mechanisms of Regulation in the Human Immune System”, Thesis for the degree of Philosophiae Doctor (PhD), The Biotechnology Centre of Ola, University of Oslo, Norway, 2009).

[0046] In naïve T-cells, hyperphosphorylated PAG targets Csk to lipid rafts. Via the Ezrin-EBP50-PAG scaffold complex PKA is targeted to Csk. Through specific phosphorylation by PKA, Csk can negatively regulate Lck and Fyn to dampen their activity and downregulate T-cell activation (see FIG. 6 of Abrahamsen H. et al., 2004, ibid). Upon TCR activation, PAG is dephosphorylated and Csk is released from the rafts. Dissociation of Csk is needed for T-cell activation to proceed. Within the same time course, a Csk-G3BP complex is formed and seems to sequester Csk outside lipid rafts (see Mosenden R. and Tasken K., 2011, ibid, and Tasken K. and Ruppelt A., 2006, ibid).

[0047] In contrast, combined TCR and CD28 stimulation mediates recruitment of the cyclic nucleotide phosphodiesterase PDE4 to lipid rafts, which enhances cAMP degradation (see FIG. 6 of Abrahamsen H. et al., 2004, ibid). As such, TCR induced production of cAMP is countered, and the T-cell immune response potentiated. Upon TCR stimulation alone, PDE4 recruitment may be too low to fully reduce the cAMP levels and therefore maximal T-cell activation cannot occur (see Abrahamsen H. et al., 2004, ibid).

[0048] Thus, by active suppression of proximal TCR signaling, signaling via cAMP-PKA-Csk is thought to set the threshold for T-cell activation. Recruitment of PDEs can counter this suppression. Tissue or cell-type specific regulation is accomplished through expression of multiple isoforms of AC, PKA, and PDEs. As mentioned above, the balance between activation and suppression needs to be tightly regulated to prevent development of autoimmune disorders, immune deficiencies and cancer.

[0049] The identified T-Cell receptor signaling genes CD2, CD247, CD28, CD3E, CD3G, CD4, CSK, EZR, FYN, LAT, LCK, PAG1, PDE4D, PRKACA, PRKACB, PTPRC, and ZAP70 were identified as follows: A group of 538 prostate cancer patients were treated with RP and the prostate cancer tissue was stored together with clinical (e.g., pathological Gleason grade group (pGGG), pathology state (pT stage)) as well as relevant outcome parameters (e.g., biochemical recurrence (BCR), metastatic recurrence, prostate cancer specific death (PCa death), salvage radiation treatment (SRT), salvage androgen deprivation treatment (SADT), chemotherapy (CTX)). For each of these patients, a PDE4D7 score was calculated and categorized into four PDE4D7 score classes as described in Alves de Inda M. et al., “Validation of Cyclic Adenosine Monophosphate Phosphodiesterase-4D7 for its Independent Contribution to Risk Stratification in a Prostate Cancer Patient Cohort with Longitudinal Biological Outcomes”, Eur Urol Focus, Vol. 4, No. 3, pages 376-384, 2018. PDE4D7 score class 1 represents patient samples with lowest expression levels of PDE4D7, whereas PDE4D7 score class 4 represents patient samples with highest levels of PDE4D7 expression. RNASeq expression data (TPM – Transcripts Per Million) of the 538 prostate cancer subjects was then investigated for differential gene expression between the PDE4D7 score classes 1 and 4. In particular, it was determined for around 20,000 protein coding transcripts whether the mean expression level of the PDE4D7 score class 1 patients was more than twice as high as the mean expression level of the PDE4D7 score class 4 patients. This analysis resulted in 637 genes with a ratio PDE4D7 score class 1 / PDE4D7 score class 4 of > 2 with a minimum mean expression of 1 TPM in each of the four PDE4D7 score classes. These 637 genes were then further subjected to molecular pathway analysis (www.david.ncifcrf.gov), which resulted in a range of enriched annotation clusters. The annotation cluster #6 demonstrated enrichment (enrichment score: 5.9) in 17 genes with a function in primary immune deficiency and activation of T-Cell receptor signaling. A further heat map analysis confirmed that these T-Cell receptor signaling genes were generally higher expressed in samples from patients in PDE4D7 score class 1 than from patients in PDE4D7 score class 4.

### PDE4D7 Correlated Genes

[0050] The identified PDE4D7 correlated genes ABCC5, CUX2, KIAA1549, PDE4D, RAP1GAP2, SLC39A11, TDRD1, and VWA2 were identified as follows: We have identified in RNAseq data generated on 571 prostate cancer patients on close to 60,000 transcripts a range of genes that are correlated to the expression of the known biomarker PDE4D7 in this data. The correlation between the expression of any of these genes and PDE4D7 across the 571 samples was done by Pearson correlation and is expressed as a value between 0 to 1 in case of positive correlation or a value between -1 to 0 in case of negative correlation.

[0051] The equation for the correlation coefficient is:

$$C o r r \left(X , Y\right) = \frac{\sum \left(x - \overline{x}\right) \left(y - \overline{y}\right)}{\sqrt{\sum {\left(x - \overline{x}\right)}^{2} \sum {\left(y - \overline{y}\right)}^{2}}} \qquad \text{(1)}$$

where x̅ and y̅ are the sample means AVERAGE(PDE4D7) and AVERAGE(gene) across all samples, respectively. As input data for the calculation of the correlation coefficient we used the PDE4D7 score (see Alves de Inda M. et al., 2018, ibid) and the RNAseq determined TPM gene expression value per gene of interest (see below).

[0052] The maximum negative correlation coefficient identified between the expression of any of the approximately 60,000 transcripts and the expression of PDE4D7 was –0.38 while the maximum positive correlation coefficient identified between the expression of any of the approximately 60,000 transcripts and the expression of PDE4D7 was +0.56. We selected genes in the range of correlation -0.31 to -0.38 as well as +0.41 to +0.56. We identified in total 77 transcripts matching these characteristics. From those 77 transcripts we selected the eight PDE4D7 correlated genes ABCC5, CUX2, KIAA1549, PDE4D, RAP1GAP2, SLC39A11, TDRD1, and VWA2 by testing Cox regression combination models iteratively in a sub-cohort of 186 patients who were undergoing salvage radiation treatment (SRT) due to post-surgical biochemical relapse. The clinical endpoint tested was prostate cancer specific death after start of SRT. The boundary condition for the selection of the eight genes was given by the restriction that the p-values in the multivariate Cox-regression were <0.1 for all genes retained in the model.

[0053] The term “ABCC5” refers to the human ATP binding cassette subfamily C member 5 gene (Ensembl: ENSG00000114770), for example, to the sequence as defined in NCBI Reference Sequence NM_001023587.2 or in NCBI Reference Sequence NM_005688.3, specifically, to the nucleotide sequence as set forth in SEQ ID NO:1 or in SEQ ID NO:2, which correspond to the sequences of the above indicated NCBI Reference Sequences of the ABCC5 transcript, and also relates to the corresponding amino acid sequence for example as set forth in SEQ ID NO:3 or in SEQ ID NO:4, which correspond to the protein sequences defined in NCBI Protein Accession Reference Sequence NP_001018881.1 and in NCBI Protein Accession Reference Sequence NP_005679 encoding the ABCC5 polypeptide.

[0054] The term “ABCC5” also comprises nucleotide sequences showing a high degree of homology to ABCC5, e.g., nucleic acid sequences being at least 75%, 80%, 85%, 90%, 91%, 92%, 93%, 94%, 95%, 96%, 97%, 98% or 99% identical to the sequence as set forth in SEQ ID NO:1 or in SEQ ID NO:2 or amino acid sequences being at least 75%, 80%, 85%, 90%, 91%, 92%, 93%, 94%, 95%, 96%, 97%, 98% or 99% identical to the sequence as set forth in SEQ ID NO:3 or in SEQ ID NO:4 or nucleic acid sequences encoding amino acid sequences being at least 75%, 80%, 85%, 90%, 91%, 92%, 93%, 94%, 95%, 96%, 97%, 98% or 99% identical to the sequence as set forth in SEQ ID NO:3 or in SEQ ID NO:4 or amino acid sequences being encoded by nucleic acid sequences being at least 75%, 80%, 85%, 90%, 91%, 92%, 93%, 94%, 95%, 96%, 97%, 98% or 99% identical to the sequence as set forth in SEQ ID NO:1 or in SEQ ID NO:2.

[0055] The term “AIM2” refers to the Absent in Melanoma 2 gene (Ensembl: ENSG00000163568), for example, to the sequence as defined in NCBI Reference Sequence NM_004833, specifically, to the nucleotide sequence as set forth in SEQ ID NO:5, which corresponds to the sequence of the above indicated NCBI Reference Sequence of the AIM2 transcript, and also relates to the corresponding amino acid sequence for example as set forth in SEQ ID NO:6, which corresponds to the protein sequence defined in NCBI Protein Accession Reference Sequence NP_004824 encoding the AIM2 polypeptide.

[0056] The term “AIM2” also comprises nucleotide sequences showing a high degree of homology to AIM2, e.g., nucleic acid sequences being at least 75%, 80%, 85%, 90%, 91%, 92%, 93%, 94%, 95%, 96%, 97%, 98% or 99% identical to the sequence as set forth in SEQ ID NO:5 or amino acid sequences being at least 75%, 80%, 85%, 90%, 91%, 92%, 93%, 94%, 95%, 96%, 97%, 98% or 99% identical to the sequence as set forth in SEQ ID NO:6 or nucleic acid sequences encoding amino acid sequences being at least 75%, 80%, 85%, 90%, 91%, 92%, 93%, 94%, 95%, 96%, 97%, 98% or 99% identical to the sequence as set forth in SEQ ID NO:6 or amino acid sequences being encoded by nucleic acid sequences being at least 75%, 80%, 85%, 90%, 91%, 92%, 93%, 94%, 95%, 96%, 97%, 98% or 99% identical to the sequence as set forth in SEQ ID NO:5.

[0057] The term “APOBEC3A” refers to the Apolipoprotein B mRNA Editing Enzyme Catalytic Subunit 3A gene (Ensembl: ENSG00000128383), for example, to the sequence as defined in NCBI Reference Sequence NM_145699, specifically, to the nucleotide sequence as set forth in SEQ ID NO:7, which corresponds to the sequence of the above indicated NCBI Reference Sequence of the APOBEC3A transcript, and also relates to the corresponding amino acid sequence for example as set forth in SEQ ID NO:8, which corresponds to the protein sequence defined in NCBI Protein Accession Reference Sequence NP_663745 encoding the APOBEC3A polypeptide.

[0058] The term “APOBEC3A” also comprises nucleotide sequences showing a high degree of homology to APOBEC3A, e.g., nucleic acid sequences being at least 75%, 80%, 85%, 90%, 91%, 92%, 93%, 94%, 95%, 96%, 97%, 98% or 99% identical to the sequence as set forth in SEQ ID NO:7 or amino acid sequences being at least 75%, 80%, 85%, 90%, 91%, 92%, 93%, 94%, 95%, 96%, 97%, 98% or 99% identical to the sequence as set forth in SEQ ID NO:8 or nucleic acid sequences encoding amino acid sequences being at least 75%, 80%, 85%, 90%, 91%, 92%, 93%, 94%, 95%, 96%, 97%, 98% or 99% identical to the sequence as set forth in SEQ ID NO:8 or amino acid sequences being encoded by nucleic acid sequences being at least 75%, 80%, 85%, 90%, 91%, 92%, 93%, 94%, 95%, 96%, 97%, 98% or 99% identical to the sequence as set forth in SEQ ID NO:7.

[0059] The term “CD2” refers to the Cluster Of Differentiation 2 gene (Ensembl: ENSG00000116824), for example, to the sequence as defined in NCBI Reference Sequence NM_001767, specifically, to the nucleotide sequence as set forth in SEQ ID NO:9, which corresponds to the sequence of the above indicated NCBI Reference Sequence of the CD2 transcript, and also relates to the corresponding amino acid sequence for example as set forth in SEQ ID NO:10, which corresponds to the protein sequence defined in NCBI Protein Accession Reference Sequence NP_001758 encoding the CD2 polypeptide.

[0060] The term “CD2” also comprises nucleotide sequences showing a high degree of homology to CD2, e.g., nucleic acid sequences being at least 75%, 80%, 85%, 90%, 91%, 92%, 93%, 94%, 95%, 96%, 97%, 98% or 99% identical to the sequence as set forth in SEQ ID NO:9 or amino acid sequences being at least 75%, 80%, 85%, 90%, 91%, 92%, 93%, 94%, 95%, 96%, 97%, 98% or 99% identical to the sequence as set forth in SEQ ID NO:10 or nucleic acid sequences encoding amino acid sequences being at least 75%, 80%, 85%, 90%, 91%, 92%, 93%, 94%, 95%, 96%, 97%, 98% or 99% identical to the sequence as set forth in SEQ ID NO:10 or amino acid sequences being encoded by nucleic acid sequences being at least 75%, 80%, 85%, 90%, 91%, 92%, 93%, 94%, 95%, 96%, 97%, 98% or 99% identical to the sequence as set forth in SEQ ID NO:9.

[0061] The term “CD247” refers to the Cluster Of Differentiation 247 gene (Ensembl: ENSG00000198821), for example, to the sequence as defined in NCBI Reference Sequence NM_000734 or in NCBI Reference Sequence NM_198053, specifically, to the nucleotide sequence as set forth in SEQ ID NO:11 or in SEQ ID NO:12, which correspond to the sequences of the above indicated NCBI Reference Sequences of the CD247 transcript, and also relates to the corresponding amino acid sequence for example as set forth in SEQ ID NO: 13 or in SEQ ID NO: 14, which correspond to the protein sequences defined in NCBI Protein Accession Reference Sequence NP_000725 and in NCBI Protein Accession Reference Sequence NP_932170 encoding the CD247 polypeptide.

[0062] The term “CD247” also comprises nucleotide sequences showing a high degree of homology to CD247, e.g., nucleic acid sequences being at least 75%, 80%, 85%, 90%, 91%, 92%, 93%, 94%, 95%, 96%, 97%, 98% or 99% identical to the sequence as set forth in SEQ ID NO:11 or in SEQ ID NO:12 or amino acid sequences being at least 75%, 80%, 85%, 90%, 91%, 92%, 93%, 94%, 95%, 96%, 97%, 98% or 99% identical to the sequence as set forth in SEQ ID NO:13 or in SEQ ID NO:14 or nucleic acid sequences encoding amino acid sequences being at least 75%, 80%, 85%, 90%, 91%, 92%, 93%, 94%, 95%, 96%, 97%, 98% or 99% identical to the sequence as set forth in SEQ ID NO:13 or in SEQ ID NO: 14 or amino acid sequences being encoded by nucleic acid sequences being at least 75%, 80%, 85%, 90%, 91%, 92%, 93%, 94%, 95%, 96%, 97%, 98% or 99% identical to the sequence as set forth in SEQ ID NO:11 or in SEQ ID NO:12.

[0063] The term “CD28” refers to the Cluster Of Differentiation 28 gene (Ensembl: ENSG00000178562), for example, to the sequence as defined in NCBI Reference Sequence NM_006139 or in NCBI Reference Sequence NM_001243078, specifically, to the nucleotide sequence as set forth in SEQ ID NO:15 or in SEQ ID NO: 16, which correspond to the sequences of the above indicated NCBI Reference Sequences of the CD28 transcript, and also relates to the corresponding amino acid sequence for example as set forth in SEQ ID NO: 17 or in SEQ ID NO: 18, which correspond to the protein sequences defined in NCBI Protein Accession Reference Sequence NP_006130 and in NCBI Protein Accession Reference Sequence NP_001230007 encoding the CD28 polypeptide.

[0064] The term “CD28” also comprises nucleotide sequences showing a high degree of homology to CD28, e.g., nucleic acid sequences being at least 75%, 80%, 85%, 90%, 91%, 92%, 93%, 94%, 95%, 96%, 97%, 98% or 99% identical to the sequence as set forth in SEQ ID NO:15 or in SEQ ID NO: 16 or amino acid sequences being at least 75%, 80%, 85%, 90%, 91%, 92%, 93%, 94%, 95%, 96%, 97%, 98% or 99% identical to the sequence as set forth in SEQ ID NO: 17 or in SEQ ID NO:18 or nucleic acid sequences encoding amino acid sequences being at least 75%, 80%, 85%, 90%, 91%, 92%, 93%, 94%, 95%, 96%, 97%, 98% or 99% identical to the sequence as set forth in SEQ ID NO:17 or in SEQ ID NO: 18 or amino acid sequences being encoded by nucleic acid sequences being at least 75%, 80%, 85%, 90%, 91%, 92%, 93%, 94%, 95%, 96%, 97%, 98% or 99% identical to the sequence as set forth in SEQ ID NO:15 or in SEQ ID NO: 16.

[0065] The term “CD3E” refers to the Cluster Of Differentiation 3E gene (Ensembl: ENSG00000198851), for example, to the sequence as defined in NCBI Reference Sequence NM_000733, specifically, to the nucleotide sequence as set forth in SEQ ID NO: 19, which corresponds to the sequence of the above indicated NCBI Reference Sequence of the CD3E transcript, and also relates to the corresponding amino acid sequence for example as set forth in SEQ ID NO:20, which corresponds to the protein sequence defined in NCBI Protein Accession Reference Sequence NP_000724 encoding the CD3E polypeptide.

[0066] The term “CD3E” also comprises nucleotide sequences showing a high degree of homology to CD3E, e.g., nucleic acid sequences being at least 75%, 80%, 85%, 90%, 91%, 92%, 93%, 94%, 95%, 96%, 97%, 98% or 99% identical to the sequence as set forth in SEQ ID NO: 19 or amino acid sequences being at least 75%, 80%, 85%, 90%, 91%, 92%, 93%, 94%, 95%, 96%, 97%, 98% or 99% identical to the sequence as set forth in SEQ ID NO:20 or nucleic acid sequences encoding amino acid sequences being at least 75%, 80%, 85%, 90%, 91%, 92%, 93%, 94%, 95%, 96%, 97%, 98% or 99% identical to the sequence as set forth in SEQ ID NO:20 or amino acid sequences being encoded by nucleic acid sequences being at least 75%, 80%, 85%, 90%, 91%, 92%, 93%, 94%, 95%, 96%, 97%, 98% or 99% identical to the sequence as set forth in SEQ ID NO: 19.

[0067] The term “CD3G” refers to the Cluster Of Differentiation 3G gene (Ensembl: ENSG00000160654), for example, to the sequence as defined in NCBI Reference Sequence NM_000073, specifically, to the nucleotide sequence as set forth in SEQ ID NO:21, which corresponds to the sequence of the above indicated NCBI Reference Sequence of the CD3G transcript, and also relates to the corresponding amino acid sequence for example as set forth in SEQ ID NO:22, which corresponds to the protein sequence defined in NCBI Protein Accession Reference Sequence NP_000064 encoding the CD3G polypeptide.

[0068] The term “CD3G” also comprises nucleotide sequences showing a high degree of homology to CD3G, e.g., nucleic acid sequences being at least 75%, 80%, 85%, 90%, 91%, 92%, 93%, 94%, 95%, 96%, 97%, 98% or 99% identical to the sequence as set forth in SEQ ID NO:21 or amino acid sequences being at least 75%, 80%, 85%, 90%, 91%, 92%, 93%, 94%, 95%, 96%, 97%, 98% or 99% identical to the sequence as set forth in SEQ ID NO:22 or nucleic acid sequences encoding amino acid sequences being at least 75%, 80%, 85%, 90%, 91%, 92%, 93%, 94%, 95%, 96%, 97%, 98% or 99% identical to the sequence as set forth in SEQ ID NO:22 or amino acid sequences being encoded by nucleic acid sequences being at least 75%, 80%, 85%, 90%, 91%, 92%, 93%, 94%, 95%, 96%, 97%, 98% or 99% identical to the sequence as set forth in SEQ ID NO:21.

[0069] The term “CD4” refers to the Cluster Of Differentiation 4 gene (Ensembl: ENSG00000010610), for example, to the sequence as defined in NCBI Reference Sequence NM_000616, specifically, to the nucleotide sequence as set forth in SEQ ID NO:23, which corresponds to the sequence of the above indicated NCBI Reference Sequence of the CD4 transcript, and also relates to the corresponding amino acid sequence for example as set forth in SEQ ID NO:24, which corresponds to the protein sequence defined in NCBI Protein Accession Reference Sequence NP_000607 encoding the CD4 polypeptide.

[0070] The term “CD4” also comprises nucleotide sequences showing a high degree of homology to CD4, e.g., nucleic acid sequences being at least 75%, 80%, 85%, 90%, 91%, 92%, 93%, 94%, 95%, 96%, 97%, 98% or 99% identical to the sequence as set forth in SEQ ID NO:23 or amino acid sequences being at least 75%, 80%, 85%, 90%, 91%, 92%, 93%, 94%, 95%, 96%, 97%, 98% or 99% identical to the sequence as set forth in SEQ ID NO:24 or nucleic acid sequences encoding amino acid sequences being at least 75%, 80%, 85%, 90%, 91%, 92%, 93%, 94%, 95%, 96%, 97%, 98% or 99% identical to the sequence as set forth in SEQ ID NO:24 or amino acid sequences being encoded by nucleic acid sequences being at least 75%, 80%, 85%, 90%, 91%, 92%, 93%, 94%, 95%, 96%, 97%, 98% or 99% identical to the sequence as set forth in SEQ ID NO:23.

[0071] The term “CIAO1” refers to the Cytosolic Iron-Sulfur Assembly Component 1 gene (Ensembl: ENSG00000144021), for example, to the sequence as defined in NCBI Reference Sequence NM_004804, specifically, to the nucleotide sequence as set forth in SEQ ID NO:25, which corresponds to the sequence of the above indicated NCBI Reference Sequence of the CIAO1 transcript, and also relates to the corresponding amino acid sequence for example as set forth in SEQ ID NO:26, which corresponds to the protein sequence defined in NCBI Protein Accession Reference Sequence NP_663745 encoding the CIAO1 polypeptide.

[0072] The term “CIAO1” also comprises nucleotide sequences showing a high degree of homology to CIAO1, e.g., nucleic acid sequences being at least 75%, 80%, 85%, 90%, 91%, 92%, 93%, 94%, 95%, 96%, 97%, 98% or 99% identical to the sequence as set forth in SEQ ID NO:25 or amino acid sequences being at least 75%, 80%, 85%, 90%, 91%, 92%, 93%, 94%, 95%, 96%, 97%, 98% or 99% identical to the sequence as set forth in SEQ ID NO:26 or nucleic acid sequences encoding amino acid sequences being at least 75%, 80%, 85%, 90%, 91%, 92%, 93%, 94%, 95%, 96%, 97%, 98% or 99% identical to the sequence as set forth in SEQ ID NO:26 or amino acid sequences being encoded by nucleic acid sequences being at least 75%, 80%, 85%, 90%, 91%, 92%, 93%, 94%, 95%, 96%, 97%, 98% or 99% identical to the sequence as set forth in SEQ ID NO:25.

[0073] The term “CSK” refers to the C-Terminal Src Kinase gene (Ensembl: ENSG00000103653), for example, to the sequence as defined in NCBI Reference Sequence NM_004383, specifically, to the nucleotide sequence as set forth in SEQ ID NO:27, which corresponds to the sequence of the above indicated NCBI Reference Sequence of the CSK transcript, and also relates to the corresponding amino acid sequence for example as set forth in SEQ ID NO:28, which corresponds to the protein sequence defined in NCBI Protein Accession Reference Sequence NP_004374 encoding the CSK polypeptide.

[0074] The term “CSK” also comprises nucleotide sequences showing a high degree of homology to CSK, e.g., nucleic acid sequences being at least 75%, 80%, 85%, 90%, 91%, 92%, 93%, 94%, 95%, 96%, 97%, 98% or 99% identical to the sequence as set forth in SEQ ID NO:27 or amino acid sequences being at least 75%, 80%, 85%, 90%, 91%, 92%, 93%, 94%, 95%, 96%, 97%, 98% or 99% identical to the sequence as set forth in SEQ ID NO:28 or nucleic acid sequences encoding amino acid sequences being at least 75%, 80%, 85%, 90%, 91%, 92%, 93%, 94%, 95%, 96%, 97%, 98% or 99% identical to the sequence as set forth in SEQ ID NO:28 or amino acid sequences being encoded by nucleic acid sequences being at least 75%, 80%, 85%, 90%, 91%, 92%, 93%, 94%, 95%, 96%, 97%, 98% or 99% identical to the sequence as set forth in SEQ ID NO:27.

[0075] The term “CUX2” refers to the human Cut Like Homeobox 2 gene (Ensembl: ENSG00000111249), for example, to the sequence as defined in NCBI Reference Sequence NM_015267.3, specifically, to the nucleotide sequence as set forth in SEQ ID NO:29, which corresponds to the sequence of the above indicated NCBI Reference Sequence of the CUX2 transcript, and also relates to the corresponding amino acid sequence for example as set forth in SEQ ID NO:30, which corresponds to the protein sequence defined in NCBI Protein Accession Reference Sequence NP_056082.2 encoding the CUX2 polypeptide.

[0076] The term “CUX2” also comprises nucleotide sequences showing a high degree of homology to CUX2, e.g., nucleic acid sequences being at least 75%, 80%, 85%, 90%, 91%, 92%, 93%, 94%, 95%, 96%, 97%, 98% or 99% identical to the sequence as set forth in SEQ ID NO:29 or amino acid sequences being at least 75%, 80%, 85%, 90%, 91%, 92%, 93%, 94%, 95%, 96%, 97%, 98% or 99% identical to the sequence as set forth in SEQ ID NO:30 or nucleic acid sequences encoding amino acid sequences being at least 75%, 80%, 85%, 90%, 91%, 92%, 93%, 94%, 95%, 96%, 97%, 98% or 99% identical to the sequence as set forth in SEQ ID NO:30 or amino acid sequences being encoded by nucleic acid sequences being at least 75%, 80%, 85%, 90%, 91%, 92%, 93%, 94%, 95%, 96%, 97%, 98% or 99% identical to the sequence as set forth in SEQ ID NO:29.

[0077] The term “DDX58” refers to the DExD/H-box Helicase 58 gene (Ensembl: ENSG00000107201), for example, to the sequence as defined in NCBI Reference Sequence NM_014314, specifically, to the nucleotide sequence as set forth in SEQ ID NO:31, which corresponds to the sequence of the above indicated NCBI Reference Sequence of the DDX58 transcript, and also relates to the corresponding amino acid sequence for example as set forth in SEQ ID NO:32, which corresponds to the protein sequence defined in NCBI Protein Accession Reference Sequence NP_055129 encoding the DDX58 polypeptide.

[0078] The term “DDX58” also comprises nucleotide sequences showing a high degree of homology to DDX58, e.g., nucleic acid sequences being at least 75%, 80%, 85%, 90%, 91%, 92%, 93%, 94%, 95%, 96%, 97%, 98% or 99% identical to the sequence as set forth in SEQ ID NO:31 or amino acid sequences being at least 75%, 80%, 85%, 90%, 91%, 92%, 93%, 94%, 95%, 96%, 97%, 98% or 99% identical to the sequence as set forth in SEQ ID NO:32 or nucleic acid sequences encoding amino acid sequences being at least 75%, 80%, 85%, 90%, 91%, 92%, 93%, 94%, 95%, 96%, 97%, 98% or 99% identical to the sequence as set forth in SEQ ID NO:32 or amino acid sequences being encoded by nucleic acid sequences being at least 75%, 80%, 85%, 90%, 91%, 92%, 93%, 94%, 95%, 96%, 97%, 98% or 99% identical to the sequence as set forth in SEQ ID NO:31.

[0079] The term “DHX9” refers to the DExD/H-box Helicase 9 gene (Ensembl: ENSG00000135829), for example, to the sequence as defined in NCBI Reference Sequence NM_001357, specifically, to the nucleotide sequence as set forth in SEQ ID NO:33, which corresponds to the sequence of the above indicated NCBI Reference Sequence of the DHX9 transcript, and also relates to the corresponding amino acid sequence for example as set forth in SEQ ID NO:34, which corresponds to the protein sequence defined in NCBI Protein Accession Reference Sequence NP_001348 encoding the DHX9 polypeptide.

[0080] The term “DHX9” also comprises nucleotide sequences showing a high degree of homology to DHX9, e.g., nucleic acid sequences being at least 75%, 80%, 85%, 90%, 91%, 92%, 93%, 94%, 95%, 96%, 97%, 98% or 99% identical to the sequence as set forth in SEQ ID NO:33 or amino acid sequences being at least 75%, 80%, 85%, 90%, 91%, 92%, 93%, 94%, 95%, 96%, 97%, 98% or 99% identical to the sequence as set forth in SEQ ID NO:34 or nucleic acid sequences encoding amino acid sequences being at least 75%, 80%, 85%, 90%, 91%, 92%, 93%, 94%, 95%, 96%, 97%, 98% or 99% identical to the sequence as set forth in SEQ ID NO:34 or amino acid sequences being encoded by nucleic acid sequences being at least 75%, 80%, 85%, 90%, 91%, 92%, 93%, 94%, 95%, 96%, 97%, 98% or 99% identical to the sequence as set forth in SEQ ID NO:33.

[0081] The term “EZR” refers to the Ezrin gene (Ensembl: ENSG00000092820), for example, to the sequence as defined in NCBI Reference Sequence NM_003379, specifically, to the nucleotide sequence as set forth in SEQ ID NO:35, which corresponds to the sequence of the above indicated NCBI Reference Sequence of the EZR transcript, and also relates to the corresponding amino acid sequence for example as set forth in SEQ ID NO:36, which corresponds to the protein sequence defined in NCBI Protein Accession Reference Sequence NP_003370 encoding the EZR polypeptide.

[0082] The term “EZR” also comprises nucleotide sequences showing a high degree of homology to EZR, e.g., nucleic acid sequences being at least 75%, 80%, 85%, 90%, 91%, 92%, 93%, 94%, 95%, 96%, 97%, 98% or 99% identical to the sequence as set forth in SEQ ID NO:35 or amino acid sequences being at least 75%, 80%, 85%, 90%, 91%, 92%, 93%, 94%, 95%, 96%, 97%, 98% or 99% identical to the sequence as set forth in SEQ ID NO:36 or nucleic acid sequences encoding amino acid sequences being at least 75%, 80%, 85%, 90%, 91%, 92%, 93%, 94%, 95%, 96%, 97%, 98% or 99% identical to the sequence as set forth in SEQ ID NO:36 or amino acid sequences being encoded by nucleic acid sequences being at least 75%, 80%, 85%, 90%, 91%, 92%, 93%, 94%, 95%, 96%, 97%, 98% or 99% identical to the sequence as set forth in SEQ ID NO:35.

[0083] The term “FYN” refers to the FYN Proto-Oncogene gene (Ensembl: ENSG00000010810), for example, to the sequence as defined in NCBI Reference Sequence NM_002037 or in NCBI Reference Sequence NM_153047 or in NCBI Reference Sequence NM_153048, specifically, to the nucleotide sequence as set forth in SEQ ID NO:37 or in SEQ ID NO:38 or in SEQ ID NO:39, which correspond to the sequences of the above indicated NCBI Reference Sequences of the FYN transcript, and also relates to the corresponding amino acid sequence for example as set forth in SEQ ID NO:40 or in SEQ ID NO:41 or in SEQ ID NO:42, which correspond to the protein sequences defined in NCBI Protein Accession Reference Sequence NP_002028 and in NCBI Protein Accession Reference Sequence NP_694592 and in NCBI Protein Accession Reference Sequence XP_005266949 encoding the FYN polypeptide.

[0084] The term “FYN” also comprises nucleotide sequences showing a high degree of homology to FYN, e.g., nucleic acid sequences being at least 75%, 80%, 85%, 90%, 91%, 92%, 93%, 94%, 95%, 96%, 97%, 98% or 99% identical to the sequence as set forth in SEQ ID NO:37 or in SEQ ID NO:38 or in SEQ ID NO:39 or amino acid sequences being at least 75%, 80%, 85%, 90%, 91%, 92%, 93%, 94%, 95%, 96%, 97%, 98% or 99% identical to the sequence as set forth in SEQ ID NO:40 or in SEQ ID NO:41 or in SEQ ID NO:42 or nucleic acid sequences encoding amino acid sequences being at least 75%, 80%, 85%, 90%, 91%, 92%, 93%, 94%, 95%, 96%, 97%, 98% or 99% identical to the sequence as set forth in SEQ ID NO:40 or in SEQ ID NO:41 or in SEQ ID NO:42 or amino acid sequences being encoded by nucleic acid sequences being at least 75%, 80%, 85%, 90%, 91%, 92%, 93%, 94%, 95%, 96%, 97%, 98% or 99% identical to the sequence as set forth in SEQ ID NO:37 or in SEQ ID NO:38 or in SEQ ID NO:39.

[0085] The term “IFI16” refers to the Interferon Gamma Inducible Protein 16 gene (Ensembl: ENSG00000163565), for example, to the sequence as defined in NCBI Reference Sequence NM_005531, specifically, to the nucleotide sequence as set forth in SEQ ID NO:43, which corresponds to the sequence of the above indicated NCBI Reference Sequence of the IFI16 transcript, and also relates to the corresponding amino acid sequence for example as set forth in SEQ ID NO:44, which corresponds to the protein sequence defined in NCBI Protein Accession Reference Sequence NP_005522 encoding the IFI16 polypeptide.

[0086] The term “IFI16” also comprises nucleotide sequences showing a high degree of homology to IFI16, e.g., nucleic acid sequences being at least 75%, 80%, 85%, 90%, 91%, 92%, 93%, 94%, 95%, 96%, 97%, 98% or 99% identical to the sequence as set forth in SEQ ID NO:43 or amino acid sequences being at least 75%, 80%, 85%, 90%, 91%, 92%, 93%, 94%, 95%, 96%, 97%, 98% or 99% identical to the sequence as set forth in SEQ ID NO:44 or nucleic acid sequences encoding amino acid sequences being at least 75%, 80%, 85%, 90%, 91%, 92%, 93%, 94%, 95%, 96%, 97%, 98% or 99% identical to the sequence as set forth in SEQ ID NO:44 or amino acid sequences being encoded by nucleic acid sequences being at least 75%, 80%, 85%, 90%, 91%, 92%, 93%, 94%, 95%, 96%, 97%, 98% or 99% identical to the sequence as set forth in SEQ ID NO:43.

[0087] The term “IFIH1” refers to the Interferon Induced With Helicase C Domain 1 gene (Ensembl: ENSG00000115267), for example, to the sequence as defined in NCBI Reference Sequence NM_022168, specifically, to the nucleotide sequence as set forth in SEQ ID NO:45, which corresponds to the sequence of the above indicated NCBI Reference Sequence of the IFIH1 transcript, and also relates to the corresponding amino acid sequence for example as set forth in SEQ ID NO:46, which corresponds to the protein sequence defined in NCBI Protein Accession Reference Sequence NP_071451 encoding the IFIH1 polypeptide.

[0088] The term “IFIH1” also comprises nucleotide sequences showing a high degree of homology to IFIH1, e.g., nucleic acid sequences being at least 75%, 80%, 85%, 90%, 91%, 92%, 93%, 94%, 95%, 96%, 97%, 98% or 99% identical to the sequence as set forth in SEQ ID NO:45 or amino acid sequences being at least 75%, 80%, 85%, 90%, 91%, 92%, 93%, 94%, 95%, 96%, 97%, 98% or 99% identical to the sequence as set forth in SEQ ID NO:46 or nucleic acid sequences encoding amino acid sequences being at least 75%, 80%, 85%, 90%, 91%, 92%, 93%, 94%, 95%, 96%, 97%, 98% or 99% identical to the sequence as set forth in SEQ ID NO:46 or amino acid sequences being encoded by nucleic acid sequences being at least 75%, 80%, 85%, 90%, 91%, 92%, 93%, 94%, 95%, 96%, 97%, 98% or 99% identical to the sequence as set forth in SEQ ID NO:45.

[0089] The term “IFIT1” refers to the Interferon Induced Protein With Tetratricopeptide Repeats 1 gene (Ensembl: ENSG00000185745), for example, to the sequence as defined in NCBI Reference Sequence NM_001270929 or in NCBI Reference Sequence NM_001548.5, specifically, to the nucleotide sequence as set forth in SEQ ID NO:47 or in SEQ ID NO:48, which correspond to the sequences of the above indicated NCBI Reference Sequences of the IFIT1 transcript, and also relates to the corresponding amino acid sequence for example as set forth in SEQ ID NO:49 or in SEQ ID NO:50, which correspond to the protein sequences defined in NCBI Protein Accession Reference Sequence NP_001257858 and in NCBI Protein Accession Reference Sequence NP_001539 encoding the IFIT1 polypeptide.

[0090] The term “IFIT1” also comprises nucleotide sequences showing a high degree of homology to IFIT1, e.g., nucleic acid sequences being at least 75%, 80%, 85%, 90%, 91%, 92%, 93%, 94%, 95%, 96%, 97%, 98% or 99% identical to the sequence as set forth in SEQ ID NO:47 or in SEQ ID NO:48 or amino acid sequences being at least 75%, 80%, 85%, 90%, 91%, 92%, 93%, 94%, 95%, 96%, 97%, 98% or 99% identical to the sequence as set forth in SEQ ID NO:49 or in SEQ ID NO:50 or nucleic acid sequences encoding amino acid sequences being at least 75%, 80%, 85%, 90%, 91%, 92%, 93%, 94%, 95%, 96%, 97%, 98% or 99% identical to the sequence as set forth in SEQ ID NO:49 or SEQ ID NO:50 or amino acid sequences being encoded by nucleic acid sequences being at least 75%, 80%, 85%, 90%, 91%, 92%, 93%, 94%, 95%, 96%, 97%, 98% or 99% identical to the sequence as set forth in SEQ ID NO:47 or in SEQ ID NO:48.

[0091] The term “IFIT3” refers to the Interferon Induced Protein With Tetratricopeptide Repeats 3 gene (Ensembl: ENSG00000119917), for example, to the sequence as defined in NCBI Reference Sequence NM_001031683, specifically, to the nucleotide sequence as set forth in SEQ ID NO:51, which corresponds to the sequence of the above indicated NCBI Reference Sequence of the IFIT3 transcript, and also relates to the corresponding amino acid sequence for example as set forth in SEQ ID NO:52, which corresponds to the protein sequence defined in NCBI Protein Accession Reference Sequence NP_001026853 encoding the IFIT3 polypeptide.

[0092] The term “IFIT3” also comprises nucleotide sequences showing a high degree of homology to IFIT3, e.g., nucleic acid sequences being at least 75%, 80%, 85%, 90%, 91%, 92%, 93%, 94%, 95%, 96%, 97%, 98% or 99% identical to the sequence as set forth in SEQ ID NO:51 or amino acid sequences being at least 75%, 80%, 85%, 90%, 91%, 92%, 93%, 94%, 95%, 96%, 97%, 98% or 99% identical to the sequence as set forth in SEQ ID NO:52 or nucleic acid sequences encoding amino acid sequences being at least 75%, 80%, 85%, 90%, 91%, 92%, 93%, 94%, 95%, 96%, 97%, 98% or 99% identical to the sequence as set forth in SEQ ID NO:52 or amino acid sequences being encoded by nucleic acid sequences being at least 75%, 80%, 85%, 90%, 91%, 92%, 93%, 94%, 95%, 96%, 97%, 98% or 99% identical to the sequence as set forth in SEQ ID NO:51.

[0093] The term “KIAA1549” refers to the human KIAA1549 gene (Ensembl: ENSG00000122778), for example, to the sequence as defined in NCBI Reference Sequence NM_020910 or in NCBI Reference Sequence NM_001164665, specifically, to the nucleotide sequence as set forth in SEQ ID NO:53 or in SEQ ID NO:54, which correspond to the sequences of the above indicated NCBI Reference Sequence of the KIAA1549 transcript, and also relates to the corresponding amino acid sequence for example as set forth in SEQ ID NO:55 or in SEQ ID NO:56, which correspond to the protein sequences defined in NCBI Protein Accession Reference Sequence NP_065961 and in NCBI Protein Accession Reference Sequence NP_001158137 encoding the KIAA1549 polypeptide.

[0094] The term “KIAA1549” also comprises nucleotide sequences showing a high degree of homology to KIAA1549, e.g., nucleic acid sequences being at least 75%, 80%, 85%, 90%, 91%, 92%, 93%, 94%, 95%, 96%, 97%, 98% or 99% identical to the sequence as set forth in SEQ ID NO:53 or in SEQ ID NO:54 or amino acid sequences being at least 75%, 80%, 85%, 90%, 91%, 92%, 93%, 94%, 95%, 96%, 97%, 98% or 99% identical to the sequence as set forth in SEQ ID NO:55 or in SEQ ID NO:56 or nucleic acid sequences encoding amino acid sequences being at least 75%, 80%, 85%, 90%, 91%, 92%, 93%, 94%, 95%, 96%, 97%, 98% or 99% identical to the sequence as set forth in SEQ ID NO:55 or in SEQ ID NO:56 or amino acid sequences being encoded by nucleic acid sequences being at least 75%, 80%, 85%, 90%, 91%, 92%, 93%, 94%, 95%, 96%, 97%, 98% or 99% identical to the sequence as set forth in SEQ ID NO:53 or in SEQ ID NO:54.

[0095] The term “LAT” refers to the Linker For Activation Of T-Cells gene (Ensembl: ENSG00000213658), for example, to the sequence as defined in NCBI Reference Sequence NM_001014987 or in NCBI Reference Sequence NM_014387, specifically, to the nucleotide sequence as set forth in SEQ ID NO:57 or in SEQ ID NO:58, which correspond to the sequences of the above indicated NCBI Reference Sequences of the LAT transcript, and also relates to the corresponding amino acid sequence for example as set forth in SEQ ID NO:59 or in SEQ ID NO:60, which corresponds to the protein sequences defined in NCBI Protein Accession Reference Sequence NP_001014987 and in NCBI Protein Accession Reference Sequence NP_055202 encoding the LAT polypeptide.

[0096] The term “LAT” also comprises nucleotide sequences showing a high degree of homology to LAT, e.g., nucleic acid sequences being at least 75%, 80%, 85%, 90%, 91%, 92%, 93%, 94%, 95%, 96%, 97%, 98% or 99% identical to the sequence as set forth in SEQ ID NO:57 or in SEQ ID NO:58 or amino acid sequences being at least 75%, 80%, 85%, 90%, 91%, 92%, 93%, 94%, 95%, 96%, 97%, 98% or 99% identical to the sequence as set forth in SEQ ID NO:59 or in SEQ ID NO:60 or nucleic acid sequences encoding amino acid sequences being at least 75%, 80%, 85%, 90%, 91%, 92%, 93%, 94%, 95%, 96%, 97%, 98% or 99% identical to the sequence as set forth in SEQ ID NO:59 or in SEQ ID NO:60 or amino acid sequences being encoded by nucleic acid sequences being at least 75%, 80%, 85%, 90%, 91%, 92%, 93%, 94%, 95%, 96%, 97%, 98% or 99% identical to the sequence as set forth in SEQ ID NO:57 or in SEQ ID NO:58.

[0097] The term “LCK” refers to the LCK Proto-Oncogene gene (Ensembl: ENSG00000182866), for example, to the sequence as defined in NCBI Reference Sequence NM_005356, specifically, to the nucleotide sequence as set forth in SEQ ID NO:61, which corresponds to the sequence of the above indicated NCBI Reference Sequence of the LCK transcript, and also relates to the corresponding amino acid sequence for example as set forth in SEQ ID NO:62, which corresponds to the protein sequence defined in NCBI Protein Accession Reference Sequence NP_005347 encoding the LCK polypeptide.

[0098] The term “LCK” also comprises nucleotide sequences showing a high degree of homology to LCK, e.g., nucleic acid sequences being at least 75%, 80%, 85%, 90%, 91%, 92%, 93%, 94%, 95%, 96%, 97%, 98% or 99% identical to the sequence as set forth in SEQ ID NO:61 or amino acid sequences being at least 75%, 80%, 85%, 90%, 91%, 92%, 93%, 94%, 95%, 96%, 97%, 98% or 99% identical to the sequence as set forth in SEQ ID NO:62 or nucleic acid sequences encoding amino acid sequences being at least 75%, 80%, 85%, 90%, 91%, 92%, 93%, 94%, 95%, 96%, 97%, 98% or 99% identical to the sequence as set forth in SEQ ID NO:62 or amino acid sequences being encoded by nucleic acid sequences being at least 75%, 80%, 85%, 90%, 91%, 92%, 93%, 94%, 95%, 96%, 97%, 98% or 99% identical to the sequence as set forth in SEQ ID NO:61.

[0099] The term “LRRFIP1” refers to the LRR Binding FLII Interacting Protein 1 gene (Ensembl: ENSG00000124831), for example, to the sequence as defined in NCBI Reference Sequence NM_004735 or in NCBI Reference Sequence NM_001137550 or in NCBI Reference Sequence NM_001137553 or in NCBI Reference Sequence NM_001137552, specifically, to the nucleotide sequence as set forth in SEQ ID NO:63 or in SEQ ID NO:64 or in SEQ ID NO:65 or in SEQ ID NO:66, which correspond to the sequences of the above indicated NCBI Reference Sequences of the LRRFIP1 transcript, and also relates to the corresponding amino acid sequence for example as set forth in SEQ ID NO:67 or in SEQ ID NO:68 or in SEQ ID NO:69 or in SEQ ID NO:70, which correspond to the protein sequences defined in NCBI Protein Accession Reference Sequence NP_004726 and in NCBI Protein Accession Reference Sequence NP_001131022 and in NCBI Protein Accession Reference Sequence NP_001131025 and in NCBI Protein Accession Reference Sequence NP_001131024 encoding the LRRFIP1 polypeptide.

[0100] The term “LRRFIP1” also comprises nucleotide sequences showing a high degree of homology to LRRFIP1, e.g., nucleic acid sequences being at least 75%, 80%, 85%, 90%, 91%, 92%, 93%, 94%, 95%, 96%, 97%, 98% or 99% identical to the sequence as set forth in SEQ ID NO:63 or in SEQ ID NO:64 or in SEQ ID NO:65 or in SEQ ID NO:66 or amino acid sequences being at least 75%, 80%, 85%, 90%, 91%, 92%, 93%, 94%, 95%, 96%, 97%, 98% or 99% identical to the sequence as set forth in SEQ ID NO:67 or in SEQ ID NO:68 or in SEQ ID NO:69 or in SEQ ID NO:70 or nucleic acid sequences encoding amino acid sequences being at least 75%, 80%, 85%, 90%, 91%, 92%, 93%, 94%, 95%, 96%, 97%, 98% or 99% identical to the sequence as set forth in SEQ ID NO:67 or in SEQ ID NO:68 or in SEQ ID NO:69 or in SEQ ID NO:70 or amino acid sequences being encoded by nucleic acid sequences being at least 75%, 80%, 85%, 90%, 91%, 92%, 93%, 94%, 95%, 96%, 97%, 98% or 99% identical to the sequence as set forth in SEQ ID NO:63 or in SEQ ID NO:64 or in SEQ ID NO:65 or in SEQ ID NO:66.

[0101] The term “MYD88” refers to the MYD88 Innate Immune Signal Transduction Adaptor gene (Ensembl: ENSG00000172936), for example, to the sequence as defined in NCBI Reference Sequence NM_001172567 or in NCBI Reference Sequence NM_001172568 or in NCBI Reference Sequence NM_001172569 or in NCBI Reference Sequence NM_001172566 or in NCBI Reference Sequence NM_002468, specifically, to the nucleotide sequences as set forth in SEQ ID NO:71 or in SEQ ID NO:72 or in SEQ ID NO:73 or in SEQ ID NO:74 or in SEQ ID NO:75, which correspond to the sequences of the above indicated NCBI Reference Sequences of the MYD88 transcript, and also relates to the corresponding amino acid sequence for example as set forth in SEQ ID NO:76 or in SEQ ID NO:77 or in SEQ ID NO:78 or in SEQ ID NO:79 or in SEQ ID NO:80, which correspond to the protein sequences defined in NCBI Protein Accession Reference Sequence NP_001166038 and in NCBI Protein Accession Reference Sequence NP_001166039 and in NCBI Protein Accession Reference Sequence NP_001166040 and in NCBI Protein Accession Reference Sequence NP_001166037 and in NCBI Protein Accession Reference Sequence NP_002459 encoding the MYD88 polypeptide.

[0102] The term “MYD88” also comprises nucleotide sequences showing a high degree of homology to MYD88, e.g., nucleic acid sequences being at least 75%, 80%, 85%, 90%, 91%, 92%, 93%, 94%, 95%, 96%, 97%, 98% or 99% identical to the sequence as set forth in SEQ ID NO:71 or in SEQ ID NO:72 or in SEQ ID NO:73 or in SEQ ID NO:74 or in SEQ ID NO:75 or amino acid sequences being at least 75%, 80%, 85%, 90%, 91%, 92%, 93%, 94%, 95%, 96%, 97%, 98% or 99% identical to the sequence as set forth in SEQ ID NO:76 or in SEQ ID NO:77 or in SEQ ID NO:78 or in SEQ ID NO:79 or in SEQ ID NO:80 or nucleic acid sequences encoding amino acid sequences being at least 75%, 80%, 85%, 90%, 91%, 92%, 93%, 94%, 95%, 96%, 97%, 98% or 99% identical to the sequence as set forth in SEQ ID NO:76 or in SEQ ID NO:77 or in SEQ ID NO:78 or in SEQ ID NO:79 or in SEQ ID NO:80 or amino acid sequences being encoded by nucleic acid sequences being at least 75%, 80%, 85%, 90%, 91%, 92%, 93%, 94%, 95%, 96%, 97%, 98% or 99% identical to the sequence as set forth in SEQ ID NO:71 or in SEQ ID NO:72 or in SEQ ID NO:73 or in SEQ ID NO:74 or in SEQ ID NO:75.

[0103] The term “OAS1” refers to the 2′-5′-Oligoadenylate Synthetase 1 gene (Ensembl: ENSG00000089127), for example, to the sequence as defined in NCBI Reference Sequence NM_001320151 or in NCBI Reference Sequence NM_002534 or in NCBI Reference Sequence NM_001032409 or in NCBI Reference Sequence NM_016816, specifically, to the nucleotide sequences as set forth in SEQ ID NO:81 or in SEQ ID NO:82 or in SEQ ID NO:83 or in SEQ ID NO:84, which correspond to the sequences of the above indicated NCBI Reference Sequences of the OAS1 transcript, and also relates to the corresponding amino acid sequences for example as set forth in SEQ ID NO:85 or in SEQ ID NO:86 or in SEQ ID NO:87 or in SEQ ID NO:88, which correspond to the protein sequences defined in NCBI Protein Accession Reference Sequence NP_001307080 and in NCBI Protein Accession Reference Sequence NP_002525 and in NCBI Protein Accession Reference Sequence NP_001027581 and in NCBI Protein Accession Reference Sequence NP_058132 encoding the OAS1 polypeptide.

[0104] The term “OAS1” also comprises nucleotide sequences showing a high degree of homology to OAS1, e.g., nucleic acid sequences being at least 75%, 80%, 85%, 90%, 91%, 92%, 93%, 94%, 95%, 96%, 97%, 98% or 99% identical to the sequence as set forth in SEQ ID NO:81 or in SEQ ID NO:82 or in SEQ ID NO:83 or in SEQ ID NO:84 or amino acid sequences being at least 75%, 80%, 85%, 90%, 91%, 92%, 93%, 94%, 95%, 96%, 97%, 98% or 99% identical to the sequence as set forth in SEQ ID NO:85 or in SEQ ID NO:86 or in SEQ ID NO:87 or in SEQ ID NO:88 or nucleic acid sequences encoding amino acid sequences being at least 75%, 80%, 85%, 90%, 91%, 92%, 93%, 94%, 95%, 96%, 97%, 98% or 99% identical to the sequence as set forth in SEQ ID NO:85 or in SEQ ID NO:86 or in SEQ ID NO:87 or in SEQ ID NO:88 or amino acid sequences being encoded by nucleic acid sequences being at least 75%, 80%, 85%, 90%, 91%, 92%, 93%, 94%, 95%, 96%, 97%, 98% or 99% identical to the sequence as set forth in SEQ ID NO:81 or in SEQ ID NO:82 or in SEQ ID NO:83 or in SEQ ID NO:84.

[0105] The term “PAG1” refers to the Phosphoprotein Membrane Anchor With Glycosphingolipid Microdomains 1 gene (Ensembl: ENSG00000076641), for example, to the sequence as defined in NCBI Reference Sequence NM_018440, specifically, to the nucleotide sequence as set forth in SEQ ID NO:89, which corresponds to the sequence of the above indicated NCBI Reference Sequence of the PAG1 transcript, and also relates to the corresponding amino acid sequence for example as set forth in SEQ ID NO:90, which corresponds to the protein sequence defined in NCBI Protein Accession Reference Sequence NP_060910 encoding the PAG1 polypeptide.

[0106] The term “PAG1” also comprises nucleotide sequences showing a high degree of homology to PAG1, e.g., nucleic acid sequences being at least 75%, 80%, 85%, 90%, 91%, 92%, 93%, 94%, 95%, 96%, 97%, 98% or 99% identical to the sequence as set forth in SEQ ID NO:89 or amino acid sequences being at least 75%, 80%, 85%, 90%, 91%, 92%, 93%, 94%, 95%, 96%, 97%, 98% or 99% identical to the sequence as set forth in SEQ ID NO:90 or nucleic acid sequences encoding amino acid sequences being at least 75%, 80%, 85%, 90%, 91%, 92%, 93%, 94%, 95%, 96%, 97%, 98% or 99% identical to the sequence as set forth in SEQ ID NO:90 or amino acid sequences being encoded by nucleic acid sequences being at least 75%, 80%, 85%, 90%, 91%, 92%, 93%, 94%, 95%, 96%, 97%, 98% or 99% identical to the sequence as set forth in SEQ ID NO:89.

[0107] The term “PDE4D” refers to the human Phosphodiesterase 4D gene (Ensembl: ENSG00000113448), for example, to the sequence as defined in NCBI Reference Sequence NM_001104631 or in NCBI Reference Sequence NM_001349242 or in NCBI Reference Sequence NM_001197218 or in NCBI Reference Sequence NM_006203 or in NCBI Reference Sequence NM_001197221 or in NCBI Reference Sequence NM_001197220 or in NCBI Reference Sequence NM_001197223 or in NCBI Reference Sequence NM_001165899 or in NCBI Reference Sequence NM_001165899, specifically, to the nucleotide sequence as set forth in SEQ ID NO:91 or in SEQ ID NO:92 or in SEQ ID NO:93 or in SEQ ID NO:94 or in SEQ ID NO:95 or in SEQ ID NO:96 or in SEQ ID NO:97 or in SEQ ID NO:98 or in SEQ ID NO:99, which correspond to the sequences of the above indicated NCBI Reference Sequence of the PDE4D transcript, and also relates to the corresponding amino acid sequence for example as set forth in SEQ ID NO:100 or in SEQ ID NO:101 or in SEQ ID NO:102 or in SEQ ID NO:103 or in SEQ ID NO:104 or in SEQ ID NO:105 or in SEQ ID NO:106 or in SEQ ID NO:107 or in SEQ ID NO:108, which correspond to the protein sequences defined in NCBI Protein Accession Reference Sequence NP_001098101 and in NCBI Protein Accession Reference Sequence NP_001336171 and in NCBI Protein Accession Reference Sequence NP_001184147 and in NCBI Protein Accession Reference Sequence NP_006194 and in NCBI Protein Accession Reference Sequence NP_001184150 and in NCBI Protein Accession Reference Sequence NP_001184149 and in NCBI Protein Accession Reference Sequence NP_001184152 and in NCBI Protein Accession Reference Sequence NP_001159371 and in NCBI Protein Accession Reference Sequence NP_001184148 encoding the PDE4D polypeptide.

[0108] The term “PDE4D” also comprises nucleotide sequences showing a high degree of homology to PDE4D, e.g., nucleic acid sequences being at least 75%, 80%, 85%, 90%, 91%, 92%, 93%, 94%, 95%, 96%, 97%, 98% or 99% identical to the sequence as set forth in SEQ ID NO:91 or in SEQ ID NO:92 or in SEQ ID NO:93 or in SEQ ID NO:94 or in SEQ ID NO:95 or in SEQ ID NO:96 or in SEQ ID NO:97 or in SEQ ID NO:98 or in SEQ ID NO:99 or amino acid sequences being at least 75%, 80%, 85%, 90%, 91%, 92%, 93%, 94%, 95%, 96%, 97%, 98% or 99% identical to the sequence as set forth in SEQ ID NO:100 or in SEQ ID NO:101 or in SEQ ID NO:102 or in SEQ ID NO:103 or in SEQ ID NO:104 or in SEQ ID NO:105 or in SEQ ID NO:106 or in SEQ ID NO:107 or in SEQ ID NO:108 or nucleic acid sequences encoding amino acid sequences being at least 75%, 80%, 85%, 90%, 91%, 92%, 93%, 94%, 95%, 96%, 97%, 98% or 99% identical to the sequence as set forth in SEQ ID NO:100 or in SEQ ID NO:101 or in SEQ ID NO:102 or in SEQ ID NO:103 or in SEQ ID NO:104 or in SEQ ID NO:105 or in SEQ ID NO:106 or in SEQ ID NO:107 or in SEQ ID NO:108 or amino acid sequences being encoded by nucleic acid sequences being at least 75%, 80%, 85%, 90%, 91%, 92%, 93%, 94%, 95%, 96%, 97%, 98% or 99% identical to the sequence as set forth in SEQ ID NO:91 or in SEQ ID NO:92 or in SEQ ID NO:93 or in SEQ ID NO:94 or in SEQ ID NO:95 or in SEQ ID NO:96 or in SEQ ID NO:97 or in SEQ ID NO:98 or in SEQ ID NO:99.

[0109] The term “PRKACA” refers to the Protein Kinase cAMP-Activated Catalytic Subunit Alpha gene (Ensembl: ENSG00000072062), for example, to the sequence as defined in NCBI Reference Sequence NM_002730 or in NCBI Reference Sequence NM_207518, specifically, to the nucleotide sequences as set forth in SEQ ID NO:109 or in SEQ ID NO:110, which correspond to the sequences of the above indicated NCBI Reference Sequences of the PRKACA transcript, and also relates to the corresponding amino acid sequence for example as set forth in SEQ ID NO:111 or in SEQ ID NO:112, which correspond to the protein sequences defined in NCBI Protein Accession Reference Sequence NP_002721 and in NCBI Protein Accession Reference Sequence NP_997401 encoding the PRKACA polypeptide.

[0110] The term “PRKACA” also comprises nucleotide sequences showing a high degree of homology to PRKACA, e.g., nucleic acid sequences being at least 75%, 80%, 85%, 90%, 91%, 92%, 93%, 94%, 95%, 96%, 97%, 98% or 99% identical to the sequence as set forth in SEQ ID NO:109 or in SEQ ID NO:110 or amino acid sequences being at least 75%, 80%, 85%, 90%, 91%, 92%, 93%, 94%, 95%, 96%, 97%, 98% or 99% identical to the sequence as set forth in SEQ ID NO:111 or in SEQ ID NO:112 or nucleic acid sequences encoding amino acid sequences being at least 75%, 80%, 85%, 90%, 91%, 92%, 93%, 94%, 95%, 96%, 97%, 98% or 99% identical to the sequence as set forth in SEQ ID NO:111 or in SEQ ID NO:112 or amino acid sequences being encoded by nucleic acid sequences being at least 75%, 80%, 85%, 90%, 91%, 92%, 93%, 94%, 95%, 96%, 97%, 98% or 99% identical to the sequence as set forth in SEQ ID NO:109 or in SEQ ID NO:110.

[0111] The term “PRKACB” refers to the Protein Kinase cAMP-Activated Catalytic Subunit Beta gene (Ensembl: ENSG00000142875), for example, to the sequence as defined in NCBI Reference Sequence NM_002731 or in NCBI Reference Sequence NM_182948 or in NCBI Reference Sequence NM_001242860 or in NCBI Reference Sequence NM_001242859 or in NCBI Reference Sequence NM_001242858 or in NCBI Reference Sequence NM_001242862 or in NCBI Reference Sequence NM_001242861 or in NCBI Reference Sequence NM_001300915 or in NCBI Reference Sequence NM_207578 or in NCBI Reference Sequence NM_001242857 or in NCBI Reference Sequence NM_001300917, specifically, to the nucleotide sequence as set forth in SEQ ID NO:113 or in SEQ ID NO:114 or in SEQ ID NO:115 or in SEQ ID NO:116 or in SEQ ID NO:117 or in SEQ ID NO:118 or in SEQ ID NO:119 or in SEQ ID NO:120 or in SEQ ID NO:121 or in SEQ ID NO:122 or in SEQ ID NO:123, which correspond to the sequences of the above indicated NCBI Reference Sequences of the PRKACB transcript, and also relates to the corresponding amino acid sequence for example as set forth in SEQ ID NO:124 or in SEQ ID NO:125 or in SEQ ID NO:126 or in SEQ ID NO:127 or in SEQ ID NO:128 or in SEQ ID NO:129 or in SEQ ID NO:130 or in SEQ ID NO:131 or in SEQ ID NO:132 or in SEQ ID NO:133 or in SEQ ID NO:134, which correspond to the protein sequences defined in NCBI Protein Accession Reference Sequence NP_002722 and in NCBI Protein Accession Reference Sequence NP_891993 and in NCBI Protein Accession Reference Sequence NP_001229789 and in NCBI Protein Accession Reference Sequence NP_001229788 and in NCBI Protein Accession Reference Sequence NP_001229787 and in NCBI Protein Accession Reference Sequence NP_001229791 and in NCBI Protein Accession Reference Sequence NP_001229790 and in NCBI Protein Accession Reference Sequence NP_001287844 and in NCBI Protein Accession Reference Sequence NP_997461 and in NCBI Protein Accession Reference Sequence NP_001229786 and in NCBI Protein Accession Reference Sequence NP_001287846 encoding the PRKACB polypeptide.

[0112] The term “PRKACB” also comprises nucleotide sequences showing a high degree of homology to PRKACB, e.g., nucleic acid sequences being at least 75%, 80%, 85%, 90%, 91%, 92%, 93%, 94%, 95%, 96%, 97%, 98% or 99% identical to the sequence as set forth in SEQ ID NO:113 or in SEQ ID NO:114 or in SEQ ID NO:115 or in SEQ ID NO:116 or in SEQ ID NO:117 or in SEQ ID NO:118 or in SEQ ID NO:119 or in SEQ ID NO:120 or in SEQ ID NO:121 or in SEQ ID NO:122 or in SEQ ID NO:123 or amino acid sequences being at least 75%, 80%, 85%, 90%, 91%, 92%, 93%, 94%, 95%, 96%, 97%, 98% or 99% identical to the sequence as set forth in SEQ ID NO:124 or in SEQ ID NO:125 or in SEQ ID NO:126 or in SEQ ID NO:127 or in SEQ ID NO:128 or in SEQ ID NO:129 or in SEQ ID NO:130 or in SEQ ID NO:131 or in SEQ ID NO:132 or in SEQ ID NO:133 or in SEQ ID NO:134 or nucleic acid sequences encoding amino acid sequences being at least 75%, 80%, 85%, 90%, 91%, 92%, 93%, 94%, 95%, 96%, 97%, 98% or 99% identical to the sequence as set forth in SEQ ID NO:124 or in SEQ ID NO:125 or in SEQ ID NO:126 or in SEQ ID NO:127 or in SEQ ID NO:128 or in SEQ ID NO:129 or in SEQ ID NO:130 or in SEQ ID NO:131 or in SEQ ID NO:132 or in SEQ ID NO:133 or in SEQ ID NO:134 or amino acid sequences being encoded by nucleic acid sequences being at least 75%, 80%, 85%, 90%, 91%, 92%, 93%, 94%, 95%, 96%, 97%, 98% or 99% identical to the sequence as set forth in SEQ ID NO:113 or in SEQ ID NO:114 or in SEQ ID NO:115 or in SEQ ID NO:116 or in SEQ ID NO:117 or in SEQ ID NO:118 or in SEQ ID NO:119 or in SEQ ID NO:120 or in SEQ ID NO:121 or in SEQ ID NO:122 or in SEQ ID NO:123.

[0113] The term “PTPRC” refers to the Protein Tyrosine Phosphatase Receptor Type C gene (Ensembl: ENSG00000081237), for example, to the sequence as defined in NCBI Reference Sequence NM_002838 or in NCBI Reference Sequence NM_080921, specifically, to the nucleotide sequence as set forth in SEQ ID NO:135 or in SEQ ID NO:136, which correspond to the sequences of the above indicated NCBI Reference Sequences of the PTPRC transcript, and also relates to the corresponding amino acid sequence for example as set forth in SEQ ID NO:137 or in SEQ ID NO: 138, which correspond to the protein sequences defined in NCBI Protein Accession Reference Sequence NP_002829 encoding the PTPRC polypeptide and in NCBI Protein Accession Reference Sequence NP_563578.

[0114] The term “PTPRC” also comprises nucleotide sequences showing a high degree of homology to PTPRC, e.g., nucleic acid sequences being at least 75%, 80%, 85%, 90%, 91%, 92%, 93%, 94%, 95%, 96%, 97%, 98% or 99% identical to the sequence as set forth in SEQ ID NO:135 or in SEQ ID NO:136 or amino acid sequences being at least 75%, 80%, 85%, 90%, 91%, 92%, 93%, 94%, 95%, 96%, 97%, 98% or 99% identical to the sequence as set forth in SEQ ID NO:137 or in SEQ ID NO:138 or nucleic acid sequences encoding amino acid sequences being at least 75%, 80%, 85%, 90%, 91%, 92%, 93%, 94%, 95%, 96%, 97%, 98% or 99% identical to the sequence as set forth in SEQ ID NO:137 or in SEQ ID NO:138 or amino acid sequences being encoded by nucleic acid sequences being at least 75%, 80%, 85%, 90%, 91%, 92%, 93%, 94%, 95%, 96%, 97%, 98% or 99% identical to the sequence as set forth in SEQ ID NO:135 or in SEQ ID NO:136.

[0115] The term “RAP1GAP2” refers to the human RAP1 GTPase Activating Protein 2 gene (ENSG00000132359), for example, to the sequence as defined in NCBI Reference Sequence NM_015085 or in NCBI Reference Sequence NM_001100398 or in NCBI Reference Sequence NM_001330058, specifically, to the nucleotide sequence as set forth in SEQ ID NO:139 or in SEQ ID NO:140 or in SEQ ID NO:141, which correspond to the sequences of the above indicated NCBI Reference Sequences of the RAP1GAP2 transcript, and also relates to the corresponding amino acid sequence for example as set forth in SEQ ID NO:142 or in SEQ ID NO:143 or in SEQ ID NO:144, which correspond to the protein sequences defined in NCBI Protein Accession Reference Sequence NP_055900 and in NCBI Protein Accession Reference Sequence NP_001093868 and in NCBI Protein Accession Reference Sequence NP_001316987 encoding the RAP1GAP2 polypeptide.

[0116] The term “RAP1GAP2” also comprises nucleotide sequences showing a high degree of homology to RAP1GAP2, e.g., nucleic acid sequences being at least 75%, 80%, 85%, 90%, 91%, 92%, 93%, 94%, 95%, 96%, 97%, 98% or 99% identical to the sequence as set forth in SEQ ID NO:139 or in SEQ ID NO:140 or in SEQ ID NO:141 or amino acid sequences being at least 75%, 80%, 85%, 90%, 91%, 92%, 93%, 94%, 95%, 96%, 97%, 98% or 99% identical to the sequence as set forth in SEQ ID NO:142 or in SEQ ID NO:143 or in SEQ ID NO:144 or nucleic acid sequences encoding amino acid sequences being at least 75%, 80%, 85%, 90%, 91%, 92%, 93%, 94%, 95%, 96%, 97%, 98% or 99% identical to the sequence as set forth in SEQ ID NO:142 or in SEQ ID NO:143 or in SEQ ID NO:144 or amino acid sequences being encoded by nucleic acid sequences being at least 75%, 80%, 85%, 90%, 91%, 92%, 93%, 94%, 95%, 96%, 97%, 98% or 99% identical to the sequence as set forth in SEQ ID NO:139 or in SEQ ID NO:140 or in SEQ ID NO:141.

[0117] The term “SLC39A11” refers to the human Solute Carrier Family 39 Member 11 gene (Ensembl: ENSG00000133195), for example, to the sequence as defined in NCBI Reference Sequence NM_139177 or in NCBI Reference Sequence NM_001352692, specifically, to the nucleotide sequence as set forth in SEQ ID NO: 145 or in SEQ ID NO: 146, which correspond to the sequences of the above indicated NCBI Reference Sequences of the SLC39A11 transcript, and also relates to the corresponding amino acid sequence for example as set forth in SEQ ID NO:147 or in SEQ ID NO:148, which correspond to the protein sequences defined in NCBI Protein Accession Reference Sequence NP_631916 and in NCBI Protein Accession Reference Sequence NP_001339621 encoding the SLC39A11 polypeptide.

[0118] The term “SLC39A11” also comprises nucleotide sequences showing a high degree of homology to SLC39A11, e.g., nucleic acid sequences being at least 75%, 80%, 85%, 90%, 91%, 92%, 93%, 94%, 95%, 96%, 97%, 98% or 99% identical to the sequence as set forth in SEQ ID NO:145 or in SEQ ID NO:146 or amino acid sequences being at least 75%, 80%, 85%, 90%, 91%, 92%, 93%, 94%, 95%, 96%, 97%, 98% or 99% identical to the sequence as set forth in SEQ ID NO:147 or in SEQ ID NO: 148 or nucleic acid sequences encoding amino acid sequences being at least 75%, 80%, 85%, 90%, 91%, 92%, 93%, 94%, 95%, 96%, 97%, 98% or 99% identical to the sequence as set forth in SEQ ID NO:147 or in SEQ ID NO:148 or amino acid sequences being encoded by nucleic acid sequences being at least 75%, 80%, 85%, 90%, 91%, 92%, 93%, 94%, 95%, 96%, 97%, 98% or 99% identical to the sequence as set forth in SEQ ID NO:145 or in SEQ ID NO: 146.

[0119] The term “TDRD1” refers to the human Tudor Domain Containing 1 gene (Ensembl: ENSG00000095627), for example, to the sequence as defined in NCBI Reference Sequence NM_198795, specifically, to the nucleotide sequence as set forth in SEQ ID NO: 149, which corresponds to the sequence of the above indicated NCBI Reference Sequence of the TDRD1 transcript, and also relates to the corresponding amino acid sequence for example as set forth in SEQ ID NO: 150, which corresponds to the protein sequence defined in NCBI Protein Accession Reference Sequence NP_942090 encoding the TDRD1 polypeptide.

[0120] The term “TDRD1” also comprises nucleotide sequences showing a high degree of homology to TDRD1, e.g., nucleic acid sequences being at least 75%, 80%, 85%, 90%, 91%, 92%, 93%, 94%, 95%, 96%, 97%, 98% or 99% identical to the sequence as set forth in SEQ ID NO: 149 or amino acid sequences being at least 75%, 80%, 85%, 90%, 91%, 92%, 93%, 94%, 95%, 96%, 97%, 98% or 99% identical to the sequence as set forth in SEQ ID NO:150 or nucleic acid sequences encoding amino acid sequences being at least 75%, 80%, 85%, 90%, 91%, 92%, 93%, 94%, 95%, 96%, 97%, 98% or 99% identical to the sequence as set forth in SEQ ID NO: 150 or amino acid sequences being encoded by nucleic acid sequences being at least 75%, 80%, 85%, 90%, 91%, 92%, 93%, 94%, 95%, 96%, 97%, 98% or 99% identical to the sequence as set forth in SEQ ID NO: 149.

[0121] The term “TLR8” refers to the Toll Like Receptor 8 gene (Ensembl: ENSG00000101916), for example, to the sequence as defined in NCBI Reference Sequence NM_138636 or in NCBI Reference Sequence NM_016610, specifically, to the nucleotide sequences as set forth in SEQ ID NO:151 or in SEQ ID NO:152, which correspond to the sequences of the above indicated NCBI Reference Sequences of the TLR8 transcript, and also relates to the corresponding amino acid sequences for example as set forth in SEQ ID NO:153 or in SEQ ID NO:154, which corresponds to the protein sequences defined in NCBI Protein Accession Reference Sequence NP_619542 and in NCBI Protein Accession Reference Sequence NP_057694 encoding the TLR8 polypeptide.

[0122] The term “TLR8” also comprises nucleotide sequences showing a high degree of homology to TLR8, e.g., nucleic acid sequences being at least 75%, 80%, 85%, 90%, 91%, 92%, 93%, 94%, 95%, 96%, 97%, 98% or 99% identical to the sequence as set forth in SEQ ID NO:151 or in SEQ ID NO:152 or amino acid sequences being at least 75%, 80%, 85%, 90%, 91%, 92%, 93%, 94%, 95%, 96%, 97%, 98% or 99% identical to the sequence as set forth in SEQ ID NO:153 or in SEQ ID NO:154 or nucleic acid sequences encoding amino acid sequences being at least 75%, 80%, 85%, 90%, 91%, 92%, 93%, 94%, 95%, 96%, 97%, 98% or 99% identical to the sequence as set forth in SEQ ID NO:153 or in SEQ ID NO:154 or amino acid sequences being encoded by nucleic acid sequences being at least 75%, 80%, 85%, 90%, 91%, 92%, 93%, 94%, 95%, 96%, 97%, 98% or 99% identical to the sequence as set forth in SEQ ID NO:151 or in SEQ ID NO:152.

[0123] The term “VWA2” refers to the human Von Willebrand Factor A Domain Containing 2 gene (Ensembl: ENSG00000165816), for example, to the sequence as defined in NCBI Reference Sequence NM_001320804, specifically, to the nucleotide sequence as set forth in SEQ ID NO:155, which corresponds to the sequence of the above indicated NCBI Reference Sequence of the VWA2 transcript, and also relates to the corresponding amino acid sequence for example as set forth in SEQ ID NO:156, which corresponds to the protein sequence defined in NCBI Protein Accession Reference Sequence NP_001307733 encoding the VWA2 polypeptide.

[0124] The term “VWA2” also comprises nucleotide sequences showing a high degree of homology to VWA2, e.g., nucleic acid sequences being at least 75%, 80%, 85%, 90%, 91%, 92%, 93%, 94%, 95%, 96%, 97%, 98% or 99% identical to the sequence as set forth in SEQ ID NO: 155 or amino acid sequences being at least 75%, 80%, 85%, 90%, 91%, 92%, 93%, 94%, 95%, 96%, 97%, 98% or 99% identical to the sequence as set forth in SEQ ID NO:156 or nucleic acid sequences encoding amino acid sequences being at least 75%, 80%, 85%, 90%, 91%, 92%, 93%, 94%, 95%, 96%, 97%, 98% or 99% identical to the sequence as set forth in SEQ ID NO: 156 or amino acid sequences being encoded by nucleic acid sequences being at least 75%, 80%, 85%, 90%, 91%, 92%, 93%, 94%, 95%, 96%, 97%, 98% or 99% identical to the sequence as set forth in SEQ ID NO: 155.

[0125] The term “ZAP70” refers to the Zeta Chain Of T-Cell Receptor Associated Protein Kinase 70 gene (Ensembl: ENSG00000115085), for example, to the sequence as defined in NCBI Reference Sequence NM_001079 or in NCBI Reference Sequence NM_207519, specifically, to the nucleotide sequences as set forth in SEQ ID NO:157 or in SEQ ID NO:158, which correspond to the sequences of the above indicated NCBI Reference Sequences of the ZAP70 transcript, and also relates to the corresponding amino acid sequence for example as set forth in SEQ ID NO:159 or in SEQ ID NO:160, which corresponds to the protein sequences defined in NCBI Protein Accession Reference Sequence NP_001070 and in NCBI Protein Accession Reference Sequence NP_997402 encoding the ZAP70 polypeptide.

[0126] The term “ZAP70” also comprises nucleotide sequences showing a high degree of homology to ZAP70, e.g., nucleic acid sequences being at least 75%, 80%, 85%, 90%, 91%, 92%, 93%, 94%, 95%, 96%, 97%, 98% or 99% identical to the sequence as set forth in SEQ ID NO:157 or in SEQ ID NO:158 or amino acid sequences being at least 75%, 80%, 85%, 90%, 91%, 92%, 93%, 94%, 95%, 96%, 97%, 98% or 99% identical to the sequence as set forth in SEQ ID NO:159 or in SEQ ID NO:160 or nucleic acid sequences encoding amino acid sequences being at least 75%, 80%, 85%, 90%, 91%, 92%, 93%, 94%, 95%, 96%, 97%, 98% or 99% identical to the sequence as set forth in SEQ ID NO:159 or in SEQ ID NO:160 or amino acid sequences being encoded by nucleic acid sequences being at least 75%, 80%, 85%, 90%, 91%, 92%, 93%, 94%, 95%, 96%, 97%, 98% or 99% identical to the sequence as set forth in SEQ ID NO:157 or in SEQ ID NO:158.

[0127] The term “ZBP1” refers to the Z-DNA Binding Protein 1 gene (Ensembl: ENSG00000124256), for example, to the sequence as defined in NCBI Reference Sequence NM_030776 or in NCBI Reference Sequence NM_001160418 or in NCBI Reference Sequence NM _001160419, specifically, to the nucleotide sequence as set forth in SEQ ID NO:161 or in SEQ ID NO:162 or in SEQ ID NO:163, which corresponds to the sequence of the above indicated NCBI Reference Sequence of the ZBP1 transcript, and also relates to the corresponding amino acid sequence for example as set forth in SEQ ID NO:164 or in SEQ ID NO:165 or in SEQ ID NO:166, which corresponds to the protein sequences defined in NCBI Protein Accession Reference Sequence NP_110403 and in NCBI Protein Accession Reference Sequence NP_001153890 and in NCBI Protein Accession Reference Sequence NP_001153891 encoding the ZBP1 polypeptide.

[0128] The term “ZBP1” also comprises nucleotide sequences showing a high degree of homology to ZBP1, e.g., nucleic acid sequences being at least 75%, 80%, 85%, 90%, 91%, 92%, 93%, 94%, 95%, 96%, 97%, 98% or 99% identical to the sequence as set forth in SEQ ID NO:161 or in SEQ ID NO:162 or in SEQ ID NO:163 or amino acid sequences being at least 75%, 80%, 85%, 90%, 91%, 92%, 93%, 94%, 95%, 96%, 97%, 98% or 99% identical to the sequence as set forth in SEQ ID NO:164 or in SEQ ID NO:165 or in SEQ ID NO:166or nucleic acid sequences encoding amino acid sequences being at least 75%, 80%, 85%, 90%, 91%, 92%, 93%, 94%, 95%, 96%, 97%, 98% or 99% identical to the sequence as set forth in SEQ ID NO:164 or in SEQ ID NO:165 or in SEQ ID NO:166 or amino acid sequences being encoded by nucleic acid sequences being at least 75%, 80%, 85%, 90%, 91%, 92%, 93%, 94%, 95%, 96%, 97%, 98% or 99% identical to the sequence as set forth in SEQ ID NO:161 or in SEQ ID NO:162 or in SEQ ID NO:163.

[0129] The term “biological sample” or “sample obtained from a subject” refers to any biological material obtained via suitable methods known to the person skilled in the art from a subject, e.g., a prostate cancer patient. The term “prostate cancer subject” refers to a person having or suspected of having prostate cancer. The biological sample used may be collected in a clinically acceptable manner, e.g., in a way that nucleic acids (in particular RNA) or proteins are preserved.

[0130] The biological sample(s) may include body tissue and/or a fluid, such as, but not limited to, blood, sweat, saliva, and urine. Furthermore, the biological sample may contain a cell extract derived from or a cell population including an epithelial cell, such as a cancerous epithelial cell or an epithelial cell derived from tissue suspected to be cancerous. The biological sample may contain a cell population derived from a glandular tissue, e.g., the sample may be derived from the prostate of a male subject. Additionally, cells may be purified from obtained body tissues and fluids if necessary, and then used as the biological sample. In some realizations, the sample may be a tissue sample, a urine sample, a urine sediment sample, a blood sample, a saliva sample, a semen sample, a sample including circulating tumour cells, extracellular vesicles, a sample containing prostate secreted exosomes, or cell lines or cancer cell line.

[0131] It was further demonstrated that use of the full model (i.e. using all 8 PDE4D7 correlated genes, all 14 immune defense response genes and all 17 T-Cell receptor signaling genes) is not essential to obtain a significant predictive effect, and that significant results can already be obtained with a random selection of one of the PDE4D7 correlated genes combined with one randomly selected immune defense response gene and one randomly selected T-Cell receptor signaling gene. The examples and FIGS. 15-32 demonstrate that a random selection of one of the PDE4D7 correlated genes combined with one randomly selected immune defense response gene and one randomly selected T-Cell receptor signaling gene, that were selected from the full set of genes suffice to make a significant prediction. These random selections make it plausible that any selection of one gene from each group allows for a significant prediction of the response of a prostate cancer subject to radiotherapy.

[0132] In one particular realization, biopsy or resections samples may be obtained and/or used. Such samples may include cells or cell lysates.

[0133] It is also conceivable that the content of a biological sample is submitted to an enrichment step. For instance, a sample may be contacted with ligands specific for the cell membrane or organelles of certain cell types, e.g., prostate cells, functionalized for example with magnetic particles. The material concentrated by the magnetic particles may subsequently be used for detection and analysis steps as described herein above or below.

[0134] Furthermore, cells, e.g., tumour cells, may be enriched via filtration processes of fluid or liquid samples, e.g., blood, urine, etc. Such filtration processes may also be combined with enrichment steps based on ligand specific interactions as described herein above.

[0135] The term “prostate cancer” refers to a cancer of the prostate gland in the male reproductive system, which occurs when cells of the prostate mutate and begin to multiply out of control. Typically, prostate cancer is linked to an elevated level of prostate-specific antigen (PSA). In one embodiment of the present invention the term “prostate cancer” relates to a cancer showing PSA levels above 3.0. In another embodiment the term relates to cancer showing PSA levels above 2.0. The term “PSA level” refers to the concentration of PSA in the blood in ng/ml.

[0136] The term “non-progressive prostate cancer state” means that a sample of an individual does not show parameter values indicating “biochemical recurrence” and/or “clinical recurrence” and/or “metastases” and/or “castration-resistant disease” and/or “prostate cancer or disease specific death”.

[0137] The term “progressive prostate cancer state” means that a sample of an individual shows parameter values indicating “biochemical recurrence” and/or “clinical recurrence” and/or “metastases” and/or “castration-resistant disease” and/or “prostate cancer or disease specific death”.

[0138] The term “biochemical recurrence” generally refers to recurrent biological values of increased PSA indicating the presence of prostate cancer cells in a sample. However, it is also possible to use other markers that can be used in the detection of the presence or that rise suspicion of such presence.

[0139] The term “clinical recurrence” refers to the presence of clinical signs indicating the presence of tumour cells as measured, for example using in vivo imaging.

[0140] The term “metastases” refers to the presence of metastatic disease in organs other than the prostate.

[0141] The term “castration-resistant disease” refers to the presence of hormone-insensitive prostate cancer; i.e., a cancer in the prostate that does not any longer respond to androgen deprivation therapy (ADT).

[0142] The term “prostate cancer specific death or disease specific death” refers to death of a patient from his prostate cancer.

[0143] It is preferred that:
[0144] the one or more immune defense response genes comprise three or more, preferably, six or more, more preferably, nine or more, most preferably, all of the immune defense genes, and/or
[0145] the one or more T-Cell receptor signaling genes comprise three or more, preferably, six or more, more preferably, nine or more, most preferably, all of the T-Cell receptor signaling genes, and/or
[0146] the one or more PDE4D7 correlated genes comprise three or more, preferably, six or more, most preferably, all of the PDE4D7 correlated genes. the one or more genes comprise three or more, preferably, six or more, most preferably, all of the genes.

[0147] It is preferred that the determining of the selection of the radiotherapy dose comprises:
[0148] combining the first gene expression profiles for two or more, for example, 2, 3, 4, 5, 6, 7, 8, 9, 10, 11, 12, 13 or all, of the immune defense response genes with a regression function that had been derived from a population of prostate cancer subjects, and/or
[0149] combining the second gene expression profiles for two or more, for example, 2, 3, 4, 5, 6, 7, 8, 9, 10, 11, 12, 13, 14, 15, 16 or all, of the T-Cell receptor signaling genes with a regression function that had been derived from a population of prostate cancer subjects, and/or
[0150] combining the third gene expression profiles for two or more, for example, 2, 3, 4, 5, 6, 7 or all, of the PDE4D7 correlated genes with a regression function that had been derived from a population of prostate cancer subjects.

[0151] Cox proportional-hazards regression allows analyzing the effect of several risk factors on time to a tested event like survival. Thereby, the risk factors maybe dichotomous or discrete variables like a risk score or a clinical stage but may also be a continuous variable like a biomarker measurement or gene expression values. The probability of the endpoint (e.g., death or disease recurrence) is called the hazard. Next to the information on whether or not the tested endpoint was reached by e.g. subject in a patient cohort (e.g., patient did die or not) also the time to the endpoint is considered in the regression analysis. The hazard is modeled as: H(t) = H₀(t) · exp(w₁·V₁ + w₂·V₂ + w₃·V₃ + ...), where V₁, V₂, V₃ ... are predictor variables and H₀(t) is the baseline hazard while H(t) is the hazard at any time t. The hazard ratio (or the risk to reach the event) is represented by Ln[H(t)/ H₀(t)] = w₁·V₁ + w₂·V₂ + w₃·V₃ + ..., where the coefficients or weights w₁, w₂, w₃ ... are estimated by the Cox regression analysis and can be interpreted in a similar manner as for logistic regression analysis.

[0152] In one particular realization, the combination of the first gene expression profiles for the two or more, for example, 2, 3, 4, 5, 6, 7, 8, 9, 10, 11, 12, 13 or all, of the immune defense response genes with a regression function is determined as follows:

$$\begin{matrix}\text{IDR\_model:} \\ \left({\text{w}}_{1} ⋅ \text{AIM2}\right) + \left({\text{w}}_{2} ⋅ \text{APOBEC3A}\right) + \left({\text{w}}_{3} ⋅ \text{CIAO1}\right) + \\ \left({\text{w}}_{4} ⋅ \text{DDX58}\right) + \left({\text{w}}_{5} ⋅ \text{DHX9}\right) + \left({\text{w}}_{6} ⋅ \text{IFI16}\right) + \left({\text{w}}_{7} ⋅ \text{IFIH1}\right) + \\ \left({\text{w}}_{8} ⋅ \text{IFIT1}\right) + \left({\text{w}}_{9} ⋅ \text{IFIT3}\right) + \left({\text{w}}_{10} ⋅ \text{LRRFIP1}\right) + \left({\text{w}}_{11} ⋅ \text{MYD88}\right) + \\ \left({\text{w}}_{12} ⋅ \text{OAS1}\right) + \left({\text{w}}_{13} ⋅ \text{TLR8}\right) + \left({\text{w}}_{14} ⋅ \text{ZBP1}\right)\end{matrix} \qquad \text{(2)}$$

where w₁ to w₁₄ are weights and AIM2, APOBEC3A, CIAO1, DDX58, DHX9, IFI16, IFIH1, IFIT1, IFIT3, LRRFIP1, MYD88, OAS1, TLR8, and ZBP1 are the expression levels of the immune defense response genes.

[0153] In one example, w₁ may be about -0.8 to 0.2, such as -0.313, w₂ may be about -0.7 to 0.3, such as -0.1417, w₃ may be about -0.4 to 0.6, such as 0.1008, w₄ may be about -0.5 to 0.5, such as -0.07478, w₅ may be about -0.2 to 0.8, such as 0.277, w₆ may be about -0.6 to 0.4, such as -0.07944, w₇ may be about -0.2 to 0.8, such as 0.3036, w₈ may be about -0.6 to 0.4, such as -0.09188, w₉ may be about -0.3 to 0.7, such as 0.1661, w₁₀ may be about -1.2 to 0.2, such as -0.7105, w₁₁ may be about -0.3 to 0.7, such as 0.1615, w₁₂ may be about -0.6 to 0.4, such as -0.07468, w₁₃ may be about -0.6 to 0.4, such as -0.06677, and w₁₄ may be about -0.7 to 0.3, such as -0.155.

[0154] In one particular realization, the combination of the second gene expression profiles for the two or more, for example, 2, 3, 4, 5, 6, 7, 8, 9, 10, 11, 12, 13, 14, 15, 16 or all, of the T-Cell receptor signaling genes with a regression function is determined as follows:

$$\begin{matrix}\text{TCR\_SIGNALING\_model:} \\ \left({\text{w}}_{15} ⋅ \text{C2}\right) + \left({\text{w}}_{16} ⋅ \text{CD247}\right) + \left({\text{w}}_{17} ⋅ \text{CD28}\right) + \left({\text{w}}_{18} ⋅ \text{CD3E}\right) + \left({\text{w}}_{19} ⋅\right) \\ \left(\text{CD3G}\right) + \left({\text{w}}_{20} ⋅ \text{CD4}\right) + \left({\text{w}}_{21} ⋅ \text{CSK}\right) + \left({\text{w}}_{22} ⋅ \text{EZR}\right) + \left({\text{w}}_{23} ⋅\right) \\ \left(\text{FYN}\right) + \left({\text{w}}_{24} ⋅ \text{LAT}\right) + \left({\text{w}}_{25} ⋅ \text{LCK}\right) + \left({\text{w}}_{26} ⋅ \text{PAG1}\right) + \left({\text{w}}_{27} ⋅\right) \\ \left(\text{PDE4D}\right) + \left({\text{w}}_{28} ⋅ \text{PRKACA}\right) + \left({\text{w}}_{29} ⋅ \text{PRKACB}\right) + \left({\text{w}}_{30} ⋅\right) \\ \left(\text{PTPRC}\right) + \left({\text{w}}_{31} ⋅ \text{ZAP70}\right)\end{matrix} \qquad \text{(3)}$$

where w₁₅ to w₃₁ are weights and CD2, CD247, CD28, CD3E, CD3G, CD4, CSK, EZR, FYN, LAT, LCK, PAG1, PDE4D, PRKACA, PRKACB, PTPRC, and ZAP70 are the expression levels of the T-Cell receptor signaling genes.

[0155] In one example, w₁₅ may be about -0.1 to 0.9, such as 0.4137, w₁₆ may be about -0.6 to 0.4, such as -0.1323, w₁₇ may be about -0.1 to 0.9, such as 0.3695, w₁₈ may be about -0.8 to 0.2, such as -0.267, w₁₉ may be about -0.7 to 0.3, such as -0.1984, w₂₀ may be about -0.2 to 0.8, such as 0.3018, w₂₁ may be about 0.1 to 1.1, such as 0.6169, w₂₂ may be about -0.8 to 0.2, such as -0.2789, w₂₃ may be about -0.7 to 0.3, such as -0.1842, w₂₄ may be about 0.5 to 1.5, such as 0.4672, w₂₅ may be about -0.5 to 0.5, such as -0.07028, w₂₆ may be about -0.2 to 0.8, such as 0.3278, w₂₇ may be about -1.3 to -0.3, such as -0.8253, w₂₈ may be about 0.1 to 1.1, such as 0.6212, w₂₉ may be about -0.9 to 0.1, such as -0.4462, w₃₀ may be about -0.9 to 0.1, such as -0.4622, and w₃₁ may be about -0.1 to 0.9, such as -0.3702.

[0156] In one particular realization, the combination of the third gene expression profiles for the two or more, for example, 2, 3, 4, 5, 6, 7 or all, of the PDE4D7 correlated genes with a regression function is determined as follows:

$$\begin{matrix}\text{PDE4D7\_CORR\_model:} \\ \left({\text{w}}_{32} ⋅ \text{ABCC5}\right) + \left({\text{w}}_{33} ⋅ \text{CUX2}\right) + \left({\text{w}}_{34} ⋅ \text{KIAA1549}\right) + \left({\text{w}}_{35} ⋅\right) \\ \left(\text{PDE4D}\right) + \left({\text{w}}_{36} ⋅ \text{RAP1GAP2}\right) + \left({\text{w}}_{37} ⋅ \text{SLC39A11}\right) + \left({\text{w}}_{38} ⋅\right) \\ \left(\text{TDRD1}\right) + \left({\text{w}}_{39} ⋅ \text{VWA2}\right)\end{matrix} \qquad \text{(4)}$$

where w₃₂ to w₃₉ are weights and ABCC5, CUX2, KIAA1549, PDE4D, RAP1GAP2, SLC39A11, TDRD1, and VWA2 are the expression levels of the PDE4D7 correlated genes.

[0157] In one example, w₃₂ may be about -0.1 to 0.9, such as 0.368, w₃₃ may be about -0.3 to -1.3, such as -0.7675, w₃₄ may be about -0.1 to 0.9, such as 0.4108, w₃₅ may be about -0.1 to 0.9, such as 0.4007, w₃₆ may be about -1.2 to -0.2, such as -0.679, w₃₇ may be about 0.0 to 0.1, such as 0.5433, w₃₈ may be about 0.1 to 1.1, such as 0.6366, and w₃₉ may be about -1.0 to 0.0, such as -0.4749.

[0158] It is further preferred that the determining of the selection of the radiotherapy dose further comprises combining the combination of the first gene expression profiles, the combination of the second gene expression profiles, and the combination of the third gene expression profiles with a regression function that had been derived from a population of prostate cancer subjects.

[0159] In one particular realization, the combination is determined as follows:

$$\begin{matrix}\text{PCAI\_model:} \\ \left({\text{w}}_{40} ⋅ \text{IDR\_model}\right) + \left({\text{w}}_{41} ⋅ \text{TCR\_SIGNALING\_model}\right) + \left({\text{w}}_{42} ⋅\right) \\ \left(\text{PDE4D7\_CORR\_model}\right)\end{matrix} \qquad \text{(5)}$$

where w₄₀ to w₄₂ are weights, IDR_model is the above-described regression model based on the expression profiles for the two or more, for example, 2, 3, 4, 6, 7, 8, 9, 10, 11, 12, 13 or all, of the immune defense response genes, TCR_SIGNALING_model is the above-described regression model based on the expression profiles for the two or more, for example, 2, 3, 4, 6, 7, 8, 9, 10, 11, 12, 13, 14, 15, 16 or all, of the T-Cell receptor signaling genes, and PDE4D7_CORR_model is the above-described regression model based on the expression profiles for the two or more, for example, 2, 3, 4, 6, 7 or all, of the PDE4D7 correlated genes.

[0160] In one example, w₄₀ may be about 0.2 to 1.2, such as 0.674, w₄₁ may be about 0.0 to 1.0, such as 0.5474, and w₄₂ may be about 0.1 to 1.1, such as 0.6372.

[0161] The prediction of the radiotherapy response may also be classified or categorized into one of at least two risk groups, based on the value of the prediction of the radiotherapy outcome. For example, there may be two risk groups, or three risk groups, or four risk groups, or more than four predefined risk groups. Each risk group covers a respective range of (non-overlapping) values of the prediction of the radiotherapy outcome. For example, a risk group may indicate a probability of occurrence of a specific clinical event from 0 to <0.1 or from 0.1 to <0.25 or from 0.25 to <0.5 or from 0.5 to 1.0 or the like.

[0162] It is further preferred that the determining of the selection of the radiotherapy dose is further based on one or more clinical parameters obtained from the subject.

[0163] As mentioned above, various measures based on clinical parameters have been investigated. By further basing the selection of the radiotherapy dose on such clinical parameter(s), it can be possible to further improve the selection.

[0164] It is preferred that the clinical parameters comprise one or more of: (i) a prostate-specific antigen (PSA) level; (ii) a pathologic Gleason score (pGS); (iii) a clinical tumour stage; (iv) a pathological Gleason grade group (pGGG); (v) a pathological stage; (vi) one or more pathological variables, for example, a status of surgical margins and/or a lymph node invasion and/or an extra-prostatic growth and/or a seminal vesicle invasion; (vii) CAPRA; (viii) CAPRA-S; (ix) EAU-BCR risk groups, and; (x) another clinical risk score.

[0165] It is further preferred that the determining of the prediction of the therapy response or the personalization of the therapy comprises combining one or more of: (i) the first gene expression profile(s) for the one or more immune defense response genes; (ii) the second gene expression profile(s) for the one or more T-Cell receptor signaling genes; (iii) the third gene expression profile(s) for the one or more PDE4D7 correlated genes, and; (iv) the combination of the first gene expression profiles, the combination of the second gene expression profiles, and the combination of the third gene expression profiles, and the one or more clinical parameters obtained from the subject with a regression function that had been derived from a population of prostate cancer subjects.

[0166] In one particular realization, the combination is determined as follows:

$$\begin{matrix}\text{PCAI\&Clinical\_model:} \\ \left({\text{w}}_{43} ⋅ \text{PCAI\_model}\right) + \left({\text{w}}_{44} ⋅ \text{EAU\_BCR}\right)\end{matrix} \qquad \text{(6)}$$

where w₄₃ and w₄₄ are weights, PCAI_model is the above-described regression model based on the expression profiles for the two or more, for example, 2, 3, 4, 6, 7, 8, 9, 10, 11, 12, 13 or all, of the immune defense response genes, the expression profiles for the two or more, for example, 2, 3, 4, 6, 7, 8, 9, 10, 11, 12, 13, 14, 15, 16 or all, of the T-Cell receptor signaling genes, and the expression profiles for the two or more, for example, 2, 3, 4, 6, 7 or all, of the PDE4D7 correlated genes, and EAU_BCR is the EAU-BCR risk group (see Tilki D. et al., “External validation of the European Association of Urology Biochemical Recurrence Risk groups to predict metastasis and mortality after radical prostatectomy in a European cohort”, Eur Urol, Vol. 75, No. 6, pages 896-900, 2019).

[0167] In one example, w₄₃ may be about 0.4 to 1.4, such as 0.8887, and w₄₄ may be about 1.1 to 2.1, such as 1.6085.

[0168] It is preferred that the biological sample is obtained from the subject before the start of the radiotherapy. The gene expression profile(s) may be determined in the form of mRNA or protein in tissue of prostate cancer. Alternatively, if the genes are present in a soluble form, the gene expression profile(s) may be determined in blood.

[0169] It is further preferred that the radiotherapy is radical radiotherapy or salvage radiotherapy.

[0170] In a further aspect of the present invention, an apparatus for selecting a dose for radiotherapy of a prostate cancer subject is presented, comprising:
[0171] an input adapted to receive data indicative of a first gene expression profile for each of one or more, for example, 1, 2, 3, 4, 5, 6, 7, 8, 9, 10, 11, 12, 13 or all, immune defense response genes selected from the group consisting of: AIM2, APOBEC3A, CIAO1, DDX58, DHX9, IFI16, IFIH1, IFIT1, IFIT3, LRRFIP1, MYD88, OAS1, TLR8, and ZBP1, said first gene expression profile(s) being determined in a biological sample obtained from the subject, and/or of a second gene expression profile for each of one or more, for example, 1, 2, 3, 4, 5, 6, 7, 8, 9, 10, 11, 12, 13, 14, 15, 16 or all, T-Cell receptor signaling genes selected from the group consisting of: CD2, CD247, CD28, CD3E, CD3G, CD4, CSK, EZR, FYN, LAT, LCK, PAG1, PDE4D, PRKACA, PRKACB, PTPRC, and ZAP70, said second gene expression profile(s) being determined in a biological sample obtained from the subject, and/or of a third gene expression profile for each of one or more, for example, 1, 2, 3, 4, 5, 6, 7 or all, PDE4D7 correlated genes selected from the group consisting of: ABCC5, CUX2, KIAA1549, PDE4D, RAP1GAP2, SLC39A11, TDRD1, and VWA2, said third gene expression profile(s) being determined in a biological sample obtained from the subject,
[0172] a processor adapted to determine the selection of the radiotherapy dose based on the first gene expression profile(s), or on the second gene expression profile(s), or on the third gene expression profile(s), or on the first, second, and third gene expression profile(s), and
[0173] optionally, a providing unit adapted to provide the selection or a therapy recommendation based on the selection to a medical caregiver or the subject.

[0174] In a further aspect of the present invention, a computer program product is presented comprising instructions which, when the program is executed by a computer, cause the computer to carry out a method comprising:
[0175] receiving data indicative of a first gene expression profile for each of one or more, for example, 1, 2, 3, 4, 5, 6, 7, 8, 9, 10, 11, 12, 13 or all, immune defense response genes selected from the group consisting of: AIM2, APOBEC3A, CIAO1, DDX58, DHX9, IFI16, IFIH1, IFIT1, IFIT3, LRRFIP1, MYD88, OAS1, TLR8, and ZBP1, said first gene expression profile(s) being determined in a biological sample obtained from the subject, and/or of a second gene expression profile for each of one or more, for example, 1, 2, 3, 4, 5, 6, 7, 8, 9, 10, 11, 12, 13, 14, 15, 16 or all, T-Cell receptor signaling genes selected from the group consisting of: CD2, CD247, CD28, CD3E, CD3G, CD4, CSK, EZR, FYN, LAT, LCK, PAG1, PDE4D, PRKACA, PRKACB, PTPRC, and ZAP70, said second gene expression profile(s) being determined in a biological sample obtained from the subject, and/or of a third gene expression profile for each of one or more, for example, 1, 2, 3, 4, 5, 6, 7 or all, PDE4D7 correlated genes selected from the group consisting of: ABCC5, CUX2, KIAA1549, PDE4D, RAP1GAP2, SLC39A11, TDRD1, and VWA2, said third gene expression profile(s) being determined in a biological sample obtained from the subject,
[0176] determining a selection of a dose for radiotherapy of a prostate cancer subject based on the first gene expression profile(s), or on the second gene expression profile(s), or on the third gene expression profile(s), or on the first, second, and third gene expression profile(s), and
[0177] optionally, providing the selection or a therapy recommendation based on the selection to a medical caregiver or the subject.

[0178] In a further aspect of the present invention, a diagnostic kit is presented, comprising:
[0179] at least one primer and/or probe for determining a first gene expression profile for each of one or more, for example, 1, 2, 3, 4, 5, 6, 7, 8, 9, 10, 11, 12, 13 or all, immune defense response genes selected from the group consisting of: AIM2, APOBEC3A, CIAO1, DDX58, DHX9, IFI16, IFIH1, IFIT1, IFIT3, LRRFIP1, MYD88, OAS1, TLR8, and ZBP1, in a biological sample obtained from the subject, and/or
[0180] at least one primer and/or probe for determining a second gene expression profile for each of one or more, for example, 1, 2, 3, 4, 5, 6, 7, 8, 9, 10, 11, 12, 13, 14, 15, 16 or all, T-Cell receptor signaling genes selected from the group consisting of: CD2, CD247, CD28, CD3E, CD3G, CD4, CSK, EZR, FYN, LAT, LCK, PAG1, PDE4D, PRKACA, PRKACB, PTPRC, and ZAP70, in a biological sample obtained from the subject, and/or
[0181] at least one primer and/or probe for determining a gene expression profile for each of one or more, for example, 1, 2, 3, 4, 5, 6, 7 or all, PDE4D7 correlated genes selected from the group consisting of: ABCC5, CUX2, KIAA1549, PDE4D, RAP1GAP2, SLC39A11, TDRD1, and VWA2, in a biological sample obtained from the subject, and
[0182] optionally, an apparatus as defined in claim 10 or a computer program product as defined in claim 11.

[0183] In a further aspect of the present invention, a use of the kit as defined in claim 12 is presented.

[0184] It is preferred that the use as defined in claim 13 is in a method of selecting a dose for radiotherapy of a prostate cancer subject.

[0185] In a further aspect of the present invention, a method is presented, comprising:
[0186] receiving one or more biological sample(s) obtained from a prostate cancer subject,
[0187] using the kit as defined in claim 12 to determine a first gene expression profile for each of one or more, for example, 1, 2, 3, 4, 5, 6, 7, 8, 9, 10, 11, 12, 13 or all, immune defense response genes selected from the group consisting of: AIM2, APOBEC3A, CIAO1, DDX58, DHX9, IFI16, IFIH1, IFIT1, IFIT3, LRRFIP1, MYD88, OAS1, TLR8, and ZBP1, in a biological sample obtained from the subject, and/or
[0188] using the kit as defined in claim 12 to determine a second gene expression profile for each of one or more, for example, 1, 2, 3, 4, 5, 6, 7, 8, 9, 10, 11, 12, 13, 14, 15, 16 or all, T-Cell receptor signaling genes selected from the group consisting of: CD2, CD247, CD28, CD3E, CD3G, CD4, CSK, EZR, FYN, LAT, LCK, PAG1, PDE4D, PRKACA, PRKACB, PTPRC, and ZAP70, in a biological sample obtained from the subject, and/or
[0189] using the kit as defined in claim 12 to determine a third gene expression profile for each of one or more, for example, 1, 2, 3, 4, 5, 6, 7 or all, PDE4D7 correlated genes selected from the group consisting of: ABCC5, CUX2, KIAA1549, PDE4D, RAP1GAP2, SLC39A11, TDRD1, and VWA2, in a biological sample obtained from the subject.

[0190] In a further aspect of the present invention, a use of a first gene expression profile for each of one or more, for example, 1, 2, 3, 4, 5, 6, 7, 8, 9, 10, 11, 12, 13 or all, immune defense response genes selected from the group consisting of: AIM2, APOBEC3A, CIAO1, DDX58, DHX9, IFI16, IFIH1, IFIT1, IFIT3, LRRFIP1, MYD88, OAS1, TLR8, and ZBP1, of a second gene expression profile for each of one or more, for example, 1, 2, 3, 4, 5, 6, 7, 8, 9, 10, 11, 12, 13, 14, 15, 16 or all, T-Cell receptor signaling genes selected from the group consisting of: CD2, CD247, CD28, CD3E, CD3G, CD4, CSK, EZR, FYN, LAT, LCK, PAG1, PDE4D, PRKACA, PRKACB, PTPRC, and ZAP70, and of a third gene expression profile for each of one or more, for example, 1, 2, 3, 4, 5, 6, 7 or all, PDE4D7 correlated genes selected from the group consisting of: ABCC5, CUX2, KIAA1549, PDE4D, RAP1GAP2, SLC39A11, TDRD1, and VWA2, in a method of selecting a dose for radiotherapy of a prostate cancer subject, comprising:
[0191] determining the selection of the radiotherapy dose based on the first gene expression profile(s), or on the second gene expression profile(s), or on the third gene expression profile(s), or on the first, second, and third gene expression profile(s), and
[0192] optionally, providing the selection or a therapy recommendation based on the selectin to a medical caregiver or the subject.

[0193] It shall be understood that the method of claim 1, the apparatus of claim 10, the computer program product of claim 11, the diagnostic kit of claim 12, the use of the diagnostic kit of claim 13, the method of claim 15, and the use of first, second, and third gene expression profile(s) of claim 16 have similar and/or identical preferred embodiments, in particular, as defined in the dependent claims.

[0194] It shall be understood that a preferred embodiment of the present invention can also be any combination of the dependent claims or above embodiments with the respective independent claim.

[0195] These and other aspects of the invention will be apparent from and elucidated with reference to the embodiments described hereinafter.

### BRIEF DESCRIPTION OF THE DRAWINGS

[0196] In the following drawings:

[0197] FIG. 1 shows schematically and exemplarily a flowchart of an embodiment of a method of predicting a response of a prostate cancer subject to radiotherapy or of personalizing a therapy of a prostate cancer subject,

[0198] FIG. 2 shows the prostate cancer specific survival in the low-risk group (IDR_model<=-0.5) as defined by the IDR_model,

[0199] FIG. 3 shows the prostate cancer specific survival in the high-risk group (IDR_model>-0.5) as defined by the IDR_model,

[0200] FIG. 4 shows the prostate cancer specific survival in the low-risk group (TCR_SIGNALING_model<=0.0) as defined by the TCR_SIGNALING_model,

[0201] FIG. 5 shows the prostate cancer specific survival in the high-risk group (TCR_SIGNALING_model>0.0) as defined by the TCR_SIGNALING_model,

[0202] FIG. 6 shows the prostate cancer specific survival in the low-risk group (PDE4D7_CORR_model<=0.0) as defined by the PDE4D7_CORR_model,

[0203] FIG. 7 shows the prostate cancer specific survival in the high-risk group (PDE4D7_CORR_model>0.0) as defined by the PDE4D7_CORR_model,

[0204] FIG. 8 shows the prostate cancer specific survival in the low-risk group (PCAI_model<=0.5) as defined by the PCAI_model,

[0205] FIG. 9 shows the prostate cancer specific survival in the high-risk group (PCAI_model>0.5) as defined by the PCAI_model,

[0206] FIG. 10 shows the prostate cancer specific survival in the low-risk group (PCAI&Clinical_model<=0.5) as defined by the PCAI&Clinical_model, and

[0207] FIG. 11 shows the prostate cancer specific survival in the high-risk group (PCAI&Clinical_model>0.5) as defined by the PCAI&Clinical_model.

[0208] FIG. 12 shows a Kaplan-Meier curve of the PCAI-3.1 model in a low risk patient cohort with all patients undergoing SRT (salvage radiation treatment) after post-surgical BCR (biochemical recurrence).

[0209] FIG. 13 shows a Kaplan-Meier curve of the PCAI-3.1 model in a high risk patient cohort with all patients undergoing SRT (salvage radiation treatment) after post-surgical BCR (biochemical recurrence).

[0210] FIG. 14 shows a Kaplan-Meier curve of the PCAI-3.2 model in a low risk patient cohort with all patients undergoing SRT (salvage radiation treatment) after post-surgical BCR (biochemical recurrence).

[0211] FIG. 15 shows a Kaplan-Meier curve of the PCAI-3.2 model in a high risk patient cohort with all patients undergoing SRT (salvage radiation treatment) after post-surgical BCR (biochemical recurrence).

[0212] FIG. 16 shows a reference figure comprising a Kaplan-Meier curve of the PCAI-3.3 model in a low risk patient cohort with all patients undergoing SRT (salvage radiation treatment) after post-surgical BCR (biochemical recurrence).

[0213] FIG. 17 shows a reference figure comprising a Kaplan-Meier curve of the PCAI-3.3 model in a high risk patient cohort with all patients undergoing SRT (salvage radiation treatment) after post-surgical BCR (biochemical recurrence).

[0214] FIG. 18 shows a Kaplan-Meier curve of the PCAI-3.4 model in a low risk patient cohort with all patients undergoing SRT (salvage radiation treatment) after post-surgical BCR (biochemical recurrence).

[0215] FIG. 19 shows a Kaplan-Meier curve of the PCAI-3.4 model in a high risk patient cohort with all patients undergoing SRT (salvage radiation treatment) after post-surgical BCR (biochemical recurrence).

[0216] FIG. 20 shows a Kaplan-Meier curve of the PCAI-3.5 model in a low risk patient cohort with all patients undergoing SRT (salvage radiation treatment) after post-surgical BCR (biochemical recurrence).

[0217] FIG. 21 shows a Kaplan-Meier curve of the PCAI-3.5 model in a high risk patient cohort with all patients undergoing SRT (salvage radiation treatment) after post-surgical BCR (biochemical recurrence).

[0218] FIG. 22 shows a Kaplan-Meier curve of the PCAI-3.6 model in a low risk patient cohort with all patients undergoing SRT (salvage radiation treatment) after post-surgical BCR (biochemical recurrence).

[0219] FIG. 23 shows a Kaplan-Meier curve of the PCAI-3.6 model in a high risk patient cohort with all patients undergoing SRT (salvage radiation treatment) after post-surgical BCR (biochemical recurrence).

### DETAILED DESCRIPTION OF EMBODIMENTS

### Overview of Radiotherapy Dose Selection

[0220] FIG. 1 shows schematically and exemplarily a flowchart of an embodiment of a method of selection a dose of radiotherapy of a prostate cancer subject.

[0221] The method begins at step S100.

[0222] At step S102, a biological sample is obtained from each of a first set of patients (subjects) diagnosed with prostate cancer. Preferably, monitoring prostate cancer has been performed for these prostate cancer patients over a period of time, such as at least one year, or at least two years, or about five years, after obtaining the biological sample.

[0223] At step S104, a first gene expression profile for each of one or more, for example, 1, 2, 3, 4, 5, 6, 7, 8, 9, 10, 11, 12, 13 or all, immune defense response genes selected from the group consisting of: AIM2, APOBEC3A, CIAO1, DDX58, DHX9, IFI16, IFIH1, IFIT1, IFIT3, LRRFIP1, MYD88, OAS1, TLR8, and ZBP1, and/or a second gene expression profile for each of one or more, for example, 1, 2, 3, 4, 5, 6, 7, 8, 9, 10, 11, 12, 13, 14, 15, 16 or all, T-Cell receptor signaling genes selected from the group consisting of: CD2, CD247, CD28, CD3E, CD3G, CD4, CSK, EZR, FYN, LAT, LCK, PAG1, PDE4D, PRKACA, PRKACB, PTPRC, and ZAP70, and/or a third gene expression profile for each of two or more, for example, 2, 3, 4, 5, 6, 7 or all, PDE4D7 correlated genes selected from the group consisting of: ABCC5, CUX2, KIAA1549, PDE4D, RAP1GAP2, SLC39A11, TDRD1, and VWA2, is obtained for each of the biological samples obtained from the first set of patients, e.g., by performing RT-qPCR (real-time quantitative PCR) on RNA extracted from each biological sample. The exemplary gene expression profiles include an expression level (e.g., value) for each of the two or more genes which can be normalized using value(s) for each of a set of reference genes, such as B2M, HPRT1, POLR2A, and/or PUM1. In one realization, the gene expression level for each of the two or more genes of the first gene expression profiles, and/or the second gene expression profiles, and/or the third gene expression profiles is normalized with respect to one or more reference genes selected from the group consisting of ACTB, ALAS1, B2M, HPRT1, POLR2A, PUM1, RPLP0, TBP, TUBA1B, and/or YWHAZ, e.g., at least one, or at least two, or at least three, or, preferably, all of these reference genes.

[0224] At step S106, a regression function for assigning a selection of the radiotherapy response is determined based on the first gene expression profiles for the two or more immune defense response genes, AIM2, APOBEC3A, CIAO1, DDX58, DHX9, IFI16, IFIH1, IFIT1, IFIT3, LRRFIP1, MYD88, OAS1, TLR8, and/or ZBP1, and/or the second gene expression profiles for the two or more T-Cell receptor signaling genes, CD2, CD247, CD28, CD3E, CD3G, CD4, CSK, EZR, FYN, LAT, LCK, PAG1, PDE4D, PRKACA, PRKACB, PTPRC, and/or ZAP70, and/or the third gene expression profiles for the two or more PDE4D7 correlated genes, ABCC5, CUX2, KIAA1549, PDE4D, RAP1GAP2, SLC39A11, TDRD1, and/or VWA2, obtained for at least some of the biological samples obtained for the first set of patients and respective results obtained from the monitoring. In one particular realization, the regression function is determined as specified in Eq. (5) above.

[0225] At step S108, a biological sample is obtained from a patient (subject or individual). The patient can be a new patient or one of the first set.

[0226] At step S110, a first gene expression profile for each of one or more, for example, 1, 2, 3, 4, 5, 6, 7, 8, 9, 10, 11, 12, 13 or all, immune defense response genes selected from the group consisting of: AIM2, APOBEC3A, CIAO1, DDX58, DHX9, IFI16, IFIH1, IFIT1, IFIT3, LRRFIP1, MYD88, OAS1, TLR8, and ZBP1, and/or a second gene expression profile for each of one or more, for example, 1, 2, 3, 4, 5, 6, 7, 8, 9, 10, 11, 12, 13, 14, 15, 16 or all, T-Cell receptor signaling genes selected from the group consisting of: CD2, CD247, CD28, CD3E, CD3G, CD4, CSK, EZR, FYN, LAT, LCK, PAG1, PDE4D, PRKACA, PRKACB, PTPRC, and ZAP70, and/or a third gene expression profile is obtained for each of the two or more, for example, 2, 3, 4, 5, 6, 7 or all, PDE4D7 correlated genes, e.g., by performing PCR on the biological sample. In one realization, the gene expression level for each of the two or more genes of the first gene expression profiles, and/or the second gene expression profiles, and/or the third gene expression profiles is normalized with respect to one or more reference genes selected from the group consisting of ACTB, ALAS1, B2M, HPRT1, POLR2A, PUM1, RPLP0, TBP, TUBA1B, and/or YWHAZ, e.g., at least one, or at least two, or at least three, or, preferably, all of these reference genes. This is substantially the same as in step S104.

[0227] At step S112, a prediction of the therapy response or a personalization of the therapy based on the first gene expression profile(s), or on the second gene expression profile(s), or on the third gene expression profile(s), or on the first, second, and third gene expression profile(s) is determined for the patient using the regression function. This will be described in more detail later in the description.

[0228] At S114, a therapy recommendation may be provided, e.g., to the patient or his or her guardian, to a doctor, or to another healthcare worker, based on the selection. To this end, the selection may be categorized into one of a predefined set of risk groups, based on the value of the selection. In one particular realization, the therapy may be radiotherapy and the prediction of the therapy outcome may be negative or positive for the effectiveness of the therapy. If the prediction is negative, the recommended therapy may comprise one or more of: (i) radiotherapy provided earlier than is the standard; (ii) radiotherapy with an increased radiation dose; iii) use of other then standard EBRT radiation therapy techniques like IMRT (Intensity Modulated RT); IGRT (Image Guided RT); SBRT (Stereotactic Body RT); or Hypofractionation RT; (iv) an adjuvant therapy, such as androgen deprivation therapy; and (v) an alternative therapy that is not a radiation therapy. Furthermore, to personalize RT a recommendation for the total dose to be applied to the patient may be provided. In one particular realization, the selected RT total dose maybe selected <= 66 Gy for patients that are part of a predefined low-risk group to minimize toxicities induced by the radiation; in another realization, the selected RT total dose maybe selected > 66 Gy for patients that are part of a predefined high-risk group to maximize tumor control and patient outcome by the radiation.

[0229] The method ends at S116.

[0230] In one embodiment, the gene expression profiles at steps S104 and S110 are determined by detecting mRNA expression using two or more primers and/or probes and/or two or more sets thereof.

[0231] In one embodiment, steps S104 and S110 further comprise obtaining clinical parameters from the first set of patients and the patient, respectively. The clinical parameters may comprise one or more of: (i) a prostate-specific antigen (PSA) level; (ii) a pathologic Gleason score (pGS); (iii) a clinical tumour stage; (iv) a pathological Gleason grade group (pGGG); (v) a pathological stage; (vi) one or more pathological variables, for example, a status of surgical margins and/or a lymph node invasion and/or an extra-prostatic growth and/or a seminal vesicle invasion; (vii) CAPRA; (viii) CAPRA-S; (ix) EAU-BCR risk groups, and; (x) another clinical risk score. The regression function for assigning the selection of the radiotherapy dose that is determined in step S106 is then further based on the one or more clinical parameters obtained from at least some of the first set of patients. In step S112, the selection of the radiotherapy dose is then further based on the one or more clinical parameters, e.g., the EAU-BCR risk groups, obtained from the patient and is determined for the patient using the regression function. In one particular realization, the regression function is determined as specified in Eq. (6) above.

[0232] Based on the significant correlation with outcome after RT, we expect that the identified molecules will provide predictive value with regard to the effectiveness of radical RT and/or SRT. Furthermore, based on the significant correlation of SRT dose with patient outcome in different risk groups as defined by the identified genes we expect that SRT dose will be predictive of the effectiveness of radical RT and/or SRT.

### RESULTS

### TPM Gene Expression Values

[0233] For each gene a TPM (transcript per million) expression value was calculated based on the following steps:
[0234] 1. Divide the read counts derived from the RNAseq fastq raw data after mapping and alignment to the human genome by the length of each gene in kilobases. This results in reads per kilobase (RPK).
[0235] 2. Sum up all RPK values in a samples and divide this number by 1,000,000. This results in a ‘per million’ scaling factor.
[0236] 3. Divide the RPK values by the “per million” scaling factor. This results in a TPM expression value for each gene.

[0237] The TPM value per gene was used to calculate the reference normalized gene expression of each gene.

### Normalized Gene Expression Values

[0238] For the Cox regression modeling all gene TPM (transcript per million) based expression values from the RNAseq data were log2 normalized by the following transformation:

$$\text{TPM\_log2} = \text{log} \left(\text{TPM+1}\right) \qquad \text{(7)}$$

In a second step of normalization of the TPM_log2 expression values were normalized against the mean average of four reference genes (mean(ref_genes)) as follows:

$$\text{TPM\_log2\_norm} = \text{log2} \left(\text{TPM+1}\right) \text{- log2} \left(\text{mean} \left(\text{ref\_genes}\right)\right) \qquad \text{(8)}$$

The following reference genes were considered (TABLE 1):

TABLE 1

Reference genes.

| | |
|---|---|
| Gene Symbol | Ensembl_ID |
| ALAS1 | ENSG00000023330 |
| ACTB | ENSG00000075624 |
| RPLP0 | ENSG00000089157 |
| TBP | ENSG00000112592 |
| TUBA1B | ENSG00000123416 |
| PUM1 | ENSG00000134644 |
| YWHAZ | ENSG00000164924 |
| HPRT1 | ENSG00000165704 |
| B2M | ENSG00000166710 |
| POLR2A | ENSG00000181222 |

[0239] For these reference genes, we selected the following four B2M, HPRT1, POLR2A, and PUM1 in order to calculate the:

$$\begin{matrix}\text{log2} \left(\text{mean} \left(\text{ref\_genes}\right)\right) = \text{AVERAGE} \left(\left(\text{log2} \left(\text{B2M+1}\right) ,\right)\right) \\ \left(\text{log2} \left(\text{HPRT1+1}\right) , \text{log2} \left(\text{POLR2A+1}\right) , \text{log2} \left(\text{PUM1+1}\right)\right)\end{matrix} \qquad \text{(9)}$$

where the input data for the reference genes is their RNAseq measured gene expression in TPM (transcript per million), and AVERAGE is the mathematical mean.

[0240] In a final step, the reference gene normalized TPM_log2_norm expression values for each gene were transformed into z-scores by calculating:

$$\begin{matrix}\text{TPM\_log2\_norm\_mean\_stdev} = \left(\left(\text{TPM\_log2\_norm}\right) \text{-}\right) \\ \left(\left(\text{mean\_samples}\right)\right) / \left(\text{stdev\_samples}\right)\end{matrix} \qquad \text{(10)}$$

where TPM_log2_norm is the log2, reference gene normalized TPM value per gene; mean_samples is the mathematical mean of TPM_log2_norm vales across all samples and stdev_samples is the standard deviation of the TPM_lo2_norm values across all samples.

[0241] This process distributes the TPM_log2_norm vales around the mean 0 with a standard deviation of 1.

[0242] For the multivariate analysis of the genes of interest we used the reference gene normalized log2(TPM) z-score value of each gene as input.

### Cox Regression Analysis

[0243] We then set out to test whether the combination of the 14 immune defense response genes, the combination of the 17 T-Cell receptor signalling genes, the combination of the eight PDE4D7 correlated genes, and a combination thereof will exhibit more prognostic value. With Cox regression we modelled the expression levels of the 14 immune defense response genes, of the 17 T-Cell receptor signalling genes, and of the eight PDE4D7 correlated genes, respectively, to prostate cancer specific death after post-surgical salvage RT in a cohort of 571 prostate cancer patients.

[0244] The Cox regression functions were derived as follows:
[0245] IDR_model:
$$\begin{matrix}\left({\text{w}}_{1} ⋅ \text{AIM2}\right) + \left({\text{w}}_{2} ⋅ \text{APOBEC3A}\right) + \left({\text{w}}_{3} ⋅ \text{CIAO1}\right) + \\ \left({\text{w}}_{4} ⋅ \text{DDX58}\right) + \left({\text{w}}_{5} ⋅ \text{DHX9}\right) + \left({\text{w}}_{6} ⋅ \text{IFI16}\right) + \left({\text{w}}_{7} ⋅ \text{IFIH1}\right) + \\ \left({\text{w}}_{8} ⋅ \text{IFIT1}\right) + \left({\text{w}}_{9} ⋅ \text{IFIT3}\right) + \left({\text{w}}_{10} ⋅ \text{LRRFIP1}\right) + \left({\text{w}}_{11} ⋅ \text{MYD88}\right) + \\ \left({\text{w}}_{12} ⋅ \text{OAS1}\right) + \left({\text{w}}_{13} ⋅ \text{TLR8}\right) + \left({\text{w}}_{14} ⋅ \text{ZBP1}\right)\end{matrix}$$
[0246] TCR_SIGNALING_model:
$$\begin{matrix}\left({\text{w}}_{15} ⋅ \text{C2}\right) + \left({\text{w}}_{16} ⋅ \text{CD247}\right) + \left({\text{w}}_{17} ⋅ \text{CD28}\right) + \left({\text{w}}_{18} ⋅ \text{CD3E}\right) + \left({\text{w}}_{19} ⋅\right) \\ \left(\text{CD3G}\right) + \left({\text{w}}_{20} ⋅ \text{CD4}\right) + \left({\text{w}}_{21} ⋅ \text{CSK}\right) + \left({\text{w}}_{22} ⋅ \text{EZR}\right) + \left({\text{w}}_{23} ⋅\right) \\ \left(\text{FYN}\right) + \left({\text{w}}_{24} ⋅ \text{LAT}\right) + \left({\text{w}}_{25} ⋅ \text{LCK}\right) + \left({\text{w}}_{26} ⋅ \text{PAG1}\right) + \left({\text{w}}_{27} ⋅\right) \\ \left(\text{PDE4D}\right) + \left({\text{w}}_{28} ⋅ \text{PRKACA}\right) + \left({\text{w}}_{29} ⋅ \text{PRKACB}\right) + \left({\text{w}}_{30} ⋅\right) \\ \left(\text{PTPRC}\right) + \left({\text{w}}_{31} ⋅ \text{ZAP70}\right)\end{matrix}$$
[0247] PDE4D7_CORR_model:
$$\begin{matrix}\left({\text{w}}_{32} ⋅ \text{ABCC5}\right) + \left({\text{w}}_{33} ⋅ \text{CUX2}\right) + \left({\text{w}}_{34} ⋅ \text{KIAA1549}\right) + \left({\text{w}}_{35} ⋅\right) \\ \left(\text{PDE4D}\right) + \left({\text{w}}_{36} ⋅ \text{RAP1GAP2}\right) + \left({\text{w}}_{37} ⋅ \text{SLC39A11}\right) + \left({\text{w}}_{38} ⋅\right) \\ \left(\text{TDRD1}\right) + \left({\text{w}}_{39} ⋅ \text{VWA2}\right)\end{matrix}$$

[0248] The details for the weights w₁ to w₃₉ are shown in the following TABLE 2.

TABLE 2

Variables and weights for the three individual Cox regression models, i.e., the immune defense response model (IDR_model), the T-Cell receptor signaling model (TCR SIGNALING model), and the PDE4D7 correlation model (PDE4D7_CORR_model); NA - not available

| Variable | Weights | | | |
|---|---|---|---|---|
| Model | | IDR_model | TCR_ SIGNALING_ model | PDE4D7_ CORR_model |
| AIM2 | w₁ | -0.313 | NA | NA |
| APOBEC3A | w₂ | -0.1417 | NA | NA |
| CIAO1 | w₃ | 0.1008 | NA | NA |
| DDX58 | w₄ | -0.07478 | NA | NA |
| DHX9 | w₅ | 0.277 | NA | NA |
| IFI16 | w₆ | -0.07944 | NA | NA |
| IFIH1 | w₇ | 0.3036 | NA | NA |
| IFIT1 | w₈ | -0.09188 | NA | NA |
| IFIT3 | w₉ | 0.1661 | NA | NA |
| LRRFIP1 | w₁₀ | -0.7105 | NA | NA |
| MYD88 | w₁₁ | 0.1615 | NA | NA |
| OAS1 | w₁₂ | -0.07468 | NA | NA |
| TLR8 | w₁₃ | -0.06677 | NA | NA |
| ZBP1 | w₁₄ | -0.155 | NA | NA |
| CD2 | w₁₅ | NA | 0.4137 | NA |
| CD247 | w₁₆ | NA | -0.1323 | NA |
| CD28 | w₁₇ | NA | 0.3695 | NA |
| CD3E | w₁₈ | NA | -0.267 | NA |
| CD3G | w₁₉ | NA | -0.1984 | NA |
| CD4 | w₂₀ | NA | 0.3018 | NA |
| CSK | w₂₁ | NA | 0.6169 | NA |
| EZR | w₂₂ | NA | -0.2789 | NA |
| FYN | w₂₃ | NA | -0.1842 | NA |
| LAT | w₂₄ | NA | 0.4672 | NA |
| LCK | w₂₅ | NA | -0.07028 | NA |
| PAG1 | w₂₆ | NA | 0.3278 | NA |
| PDE4D | w₂₇ | NA | -0.8253 | NA |
| PRKACA | w₂₈ | NA | 0.6212 | NA |
| PRKACB | w₂₉ | NA | -0.4462 | NA |
| PTPRC | w₃₀ | NA | -0.4622 | NA |
| ZAP70 | w₃₁ | NA | -0.3702 | NA |
| ABCC5 | w₃₂ | NA | NA | 0.368 |
| CUX2 | w₃₃ | NA | NA | -0.7675 |
| KIAA1549 | w₃₄ | NA | NA | 0.4108 |
| PDE4D | w₃₅ | NA | NA | 0.4007 |
| RAP1GAP2 | w₃₆ | NA | NA | -0.679 |
| SLC39A11 | w₃₇ | NA | NA | 0.5433 |
| TDRD1 | w₃₈ | NA | NA | 0.6366 |
| VWA2 | w₃₉ | NA | NA | -0.4749 |

[0249] Based on the three individual Cox regression models (IDR_model, TCR_SIGNALING_model, PDE4D7_CORR_model) we then again used Cox regression to model the combination thereof to prostate cancer specific death after post-surgical salvage RT either with (PCAI&Clinical_model) or without (PCAI_model) the presence of the variable EAU_BCR in the cohort of 571 prostate cancer patients. We tested the two models in Kaplan-Meier survival analysis.

[0250] The Cox regression functions were derived as follows:
[0251] PCAI_model:
$$\begin{matrix}\left({\text{w}}_{40} ⋅ \text{IDR\_model}\right) + \left({\text{w}}_{41} ⋅ \text{TCR\_SIGNALING\_model}\right) + \left({\text{w}}_{42} ⋅\right) \\ \left(\text{PDE4D7\_CORR\_model}\right)\end{matrix}$$
[0252] PCAI&Clinical_model:
$$\left({\text{w}}_{43} ⋅ \text{PCAI\_model}\right) + \left({\text{w}}_{44} ⋅ \text{EAU\_BCR}\right)$$

[0253] The details for the weights w₄₀ to w₄₄ are shown in the following TABLE 2.

TABLE 2

Variables and weights for two combination Cox regression models, i.e., prostate cancer AI model (PCAI_model) and the PCAI & clinical model (PCAI&Clinical_model); NA — not available.

| Variable | Weights | | |
|---|---|---|---|
| Model | | PCAI_model | PCAI&Clinical |
| IDR_model | w₄₀ | 0.674 | NA |
| TCR_SIGNALING_model | w₄₁ | 0.5474 | NA |
| PDE47_CORR_model | w₄₂ | 0.6372 | NA |
| PCAI_model | w₄₃ | NA | 0.8887 |
| EAU_BCR | w₄₄ | NA | 1.6085 |

### Kaplan-Meier Survival Analysis

[0254] For Kaplan-Meier survival curve analysis, the Cox functions of the risk models (IDR_model, TCR_SIGNALING_model, PDE4D7_CORR_model, PCAI_model and PCAI&Clinical_model) were categorized into two sub-cohorts based on a cut-off. The threshold for group separation into low risk and high risk was based on the mean Cox regression calculated prognostic index (PI) of the IDR_model, TCR_SIGNALING_model, PDE4D7_CORR_model, PCAI_model and PCAI&Clinical_model, respectively, as calculated by use of the Cox regression model per patient in the entire cohort.

[0255] The patient classes represent an increasing risk to experience the tested clinical endpoints of prostate cancer specific death (PCa Death) after the start of salvage radiation therapy (SRT) due to post-surgical disease recurrence (FIGS. 2 to 11) and death after the start of salvage radiation therapy (SRT) due to post-surgical disease recurrence for the created risk models (IDR_model, TCR_SIGNALING_model, PDE4D7_CORR_model, PCAI_model and PCAI&Clinical_model).

[0256] FIG. 2 shows the prostate cancer specific survival in the low-risk group (IDR_model<=-0.5) as defined by the IDR_model. The subjects in this group were further separated into a patient cohort treated with low-dose SRT (defined as total dose applied <= 66 Gy) vs. a patient cohort treated with high-dose SRT (defined as total dose applied > 66 Gy) (see Ohri N. et al., “Salvage radiotherapy for prostate cancer — Finding a way forward using radiobiological modeling”, Cancer Biol Ther., Vol. 13, No. 4, pages 1449-1453, 2012). The survival curves for the two patient groups are shown; no statistically significant difference in prostate cancer specific survival was found in this patient cohort (logrank p=0.2; HR low risk vs. high risk=NA; 95% CI=NA). The following supplementary lists indicate the number of patients at risk for the SRT dose classes analyzed, i.e., the patients at risk at any time interval +20 months after SRT are shown: Low dose: 10, 10, 10, 10, 7, 3, 2, 1, 1, 1, 0; High dose: 25, 24, 22, 18, 14, 8, 7, 5, 2, 2, 0.

[0257] FIG. 3 shows the prostate cancer specific survival in the high-risk group (IDR_model>-0.5) as defined by the IDR_model. The subjects in this group were further separated into a patient cohort treated with low-dose SRT (defined as total dose applied <= 66 Gy) vs. a patient cohort treated with high-dose SRT (defined as total dose applied > 66 Gy) (see Ohri N. et al., 2012, ibid). The survival curves for the two patient groups are shown; a statistically significant difference in prostate cancer specific survival was found in this patient cohort (logrank p=0.05; HR low risk vs. high risk=4.1; 95% CI=1.0-16.7). The following supplementary lists indicate the number of patients at risk for the SRT dose classes analyzed, i.e., the patients at risk at any time interval +20 months after SRT are shown: Low dose: 25, 24, 23, 20, 18, 11, 7, 5, 2, 0; High dose: 38, 38, 36, 29, 25, 14, 10, 7, 5, 0.

[0258] FIG. 4 shows the prostate cancer specific survival in the low-risk group (TCR_SIGNALING_model<=0.0) as defined by the TCR_SIGNALING_model. The subjects in this group were further separated into a patient cohort treated with low-dose SRT (defined as total dose applied <= 66 Gy) vs. a patient cohort treated with high-dose SRT (defined as total dose applied > 66 Gy) (see Ohri N. et al., 2012, ibid). The survival curves for the two patient groups are shown; no statistically significant difference in prostate cancer specific survival was found in this patient cohort (logrank p=NA; HR low risk vs. high risk=NA; 95% CI=NA). The following supplementary lists indicate the number of patients at risk for the SRT dose classes analyzed, i.e., the patients at risk at any time interval +20 months after SRT are shown: Low dose: 13, 13, 13, 13, 11, 5, 4, 2, 1, 0; High dose: 26, 25, 24, 20, 15, 7, 5, 3, 3, 0.

[0259] FIG. 5 shows the prostate cancer specific survival in the high-risk group (TCR_SIGNALING_model>0.0) as defined by the TCR_SIGNALING_model. The subjects in this group were further separated into a patient cohort treated with low-dose SRT (defined as total dose applied <= 66 Gy) vs. a patient cohort treated with high-dose SRT (defined as total dose applied > 66 Gy) (see Ohri N. et al., 2012, ibid). The survival curves for the two patient groups are shown; a statistically significant difference in prostate cancer specific survival was found in this patient cohort (logrank p=0.01; HR low risk vs. high risk=5.6; 95% CI=1.4-21.4). The following supplementary lists indicate the number of patients at risk for the SRT dose classes analyzed, i.e., the patients at risk at any time interval +20 months after SRT are shown: Low dose: 22, 21, 20, 17, 14, 9, 5, 4, 2, 1, 0; High dose: 37, 37, 34, 27, 24, 15, 12, 9,4,2,0.

[0260] FIG. 6 shows the prostate cancer specific survival in the low-risk group (PDE4D7_CORR_model<=0.0) as defined by the PDE4D7_CORR_model. The subjects in this group were further separated into a patient cohort treated with low-dose SRT (defined as total dose applied <= 66 Gy) vs. a patient cohort treated with high-dose SRT (defined as total dose applied > 66 Gy) (see Ohri N. et al., 2012, ibid). The survival curves for the two patient groups are shown; no statistically significant difference in prostate cancer specific survival was found in this patient cohort (logrank p=0.9; HR low risk vs. high risk=1.2; 95% CI=0.07-19.2). The following supplementary lists indicate the number of patients at risk for the SRT dose classes analyzed, i.e., the patients at risk at any time interval +20 months after SRT are shown: Low dose: 18, 18, 18, 17, 14, 9, 6, 4, 2, 1, 0; High dose: 26, 26, 25, 21, 16, 10, 9, 6, 5,2,0.

[0261] FIG. 7 shows the prostate cancer specific survival in the high-risk group (PDE4D7_CORR_model>0.0) as defined by the PDE4D7_CORR_model. The subjects in this group were further separated into a patient cohort treated with low-dose SRT (defined as total dose applied <= 66 Gy) vs. a patient cohort treated with high-dose SRT (defined as total dose applied > 66 Gy) (see Ohri N. et al., 2012, ibid). The survival curves for the two patient groups are shown; a statistically significant difference in prostate cancer specific survival was found in this patient cohort (logrank p=0.002; HR low risk vs. high risk=12.3; 95% CI=2.5-60.7). The following supplementary lists indicate the number of patients at risk for the SRT dose classes analyzed, i.e., the patients at risk at any time interval +20 months after SRT are shown: Low dose: 16, 15, 14, 12, 10, 4, 3, 2, 1, 0; High dose: 36, 35, 32, 25, 22, 12, 8, 6, 2, 0.

[0262] FIG. 8 shows the prostate cancer specific survival in the low-risk group (PCAI_model<=0.5) as defined by the PCAI_model. The subjects in this group were further separated into a patient cohort treated with low-dose SRT (defined as total dose applied <= 66 Gy) vs. a patient cohort treated with high-dose SRT (defined as total dose applied > 66 Gy) (see Ohri N. et al., 2012, ibid). The survival curves for the two patient groups are shown; no statistically significant difference in prostate cancer specific survival was found in this patient cohort (logrank p=NA; HR low risk vs. high risk=NA; 95% CI=NA). The following supplementary lists indicate the number of patients at risk for the SRT dose classes analyzed, i.e., the patients at risk at any time interval +20 months after SRT are shown: Low dose: 18, 18, 18, 18, 16, 9, 5, 3, 2, 1, 0; High dose: 37, 36, 34, 28, 22, 12, 11, 7, 5, 2, 0.

[0263] FIG. 9 shows the prostate cancer specific survival in the high-risk group (PCAI_model>0.5) as defined by the PCAI_model. The subjects in this group were further separated into a patient cohort treated with low-dose SRT (defined as total dose applied <= 66 Gy) vs. a patient cohort treated with high-dose SRT (defined as total dose applied > 66 Gy) (see Ohri N. et al., 2012, ibid). The survival curves for the two patient groups are shown; a statistically significant difference in prostate cancer specific survival was found in this patient cohort (logrank p=0.01; HR low risk vs. high risk=5.6; 95% CI=1.5-21.7). The following supplementary lists indicate the number of patients at risk for the SRT dose classes analyzed, i.e., the patients at risk at any time interval +20 months after SRT are shown: Low dose: 17, 16, 15, 12, 9, 5, 4, 3, 1, 0; High dose: 26, 26, 24, 19, 17, 10, 6, 5, 2, 0.

[0264] FIG. 10 shows the prostate cancer specific survival in the low-risk group (PCAI&Clinical_ model<=0.5) as defined by the PCAI&Clinical_model.The subjects in this group were further separated into a patient cohort treated with low-dose SRT (defined as total dose applied <= 66 Gy) vs. a patient cohort treated with high-dose SRT (defined as total dose applied > 66 Gy) (see Ohri N. et al., 2012, ibid). The survival curves for the two patient groups are shown; no statistically significant difference in prostate cancer specific survival was found in this patient cohort (logrank p=NA; HR low risk vs. high risk=NA; 95% CI=NA). The following supplementary lists indicate the number of patients at risk for the SRT dose classes analyzed, i.e., the patients at risk at any time interval +20 months after SRT are shown: Low dose: 14, 14, 14, 14, 12, 5, 2, 1, 1, 0, 0; High dose: 26, 26, 25, 19, 16, 7, 6, 5, 3, 1, 0.

[0265] FIG. 11 shows the prostate cancer specific survival in the high-risk group (PCAI&Clinical_model>0.5) as defined by the PCAI&Clinical_model.The subjects in this group were further separated into a patient cohort treated with low-dose SRT (defined as total dose applied <= 66 Gy) vs. a patient cohort treated with high-dose SRT (defined as total dose applied > 66 Gy) (see Ohri N. et al., 2012, ibid). The survival curves for the two patient groups are shown; a statistically significant difference in prostate cancer specific survival was found in this patient cohort (logrank p=0.009; HR low risk vs. high risk=9.8; 95% CI=1.8-53.9). The following supplementary lists indicate the number of patients at risk for the SRT dose classes analyzed, i.e., the patients at risk at any time interval +20 months after SRT are shown: Low dose: 15, 14, 13, 11, 8, 5, 3, 3, 1, 0; High dose: 31, 30, 27, 22, 19, 11, 7, 5, 2, 0.

[0266] The Kaplan-Meier survival curve analysis as shown in FIGS. 2 to 11 demonstrates the impact of the total radiation dose as applied during SRT on the risk of the patients to die from prostate cancer. The risk group of a patient is determined by the probability to suffer from the respective clinical endpoint (death, prostate cancer specific death) as calculated by the risk models IDR_model, TCR_SIGNALING_model, PDE4D7_CORR_model, PCAI_model or PCAI&Clinical_model. Depending on the predicted risk of a patient (i.e., depending on in which risk group the patient may belong) to die from prostate cancer different types of total dose levels for SRT might be indicated. In the lower risk groups, standard of care (SOC) with de-escalated total dose levels <= 66 Gy might be indicated to ensure tumor control while minimizing toxicities induced by the radiation. In the higher risk groups, standard of care (SOC) with escalated total dose levels > 66 Gy might be indicated and/or the use of technologies other than SOC (i.e., EBRT) like IMRT, IGRT, SBRT or Hypofractionation RT might be indicated. Furthermore, a combination of SRT with chemotherapy might provide improved longitudinal survival outcomes. Alternative options for treatment escalation are early combination of SRT (considering higher dose regimens), SADT, and chemotherapy or alternative therapies like immunotherapies (e.g., Sipuleucil-T) or other experimental therapies.

### Further Results

[0267] It was further demonstrated that use of the full model (i.e. using all 8 PDE4D7 correlated genes, all 14 immune defense response genes and all 17 T-Cell receptor signaling genes) is not essential to obtain a significant predictive effect, and that significant results can already be obtained with a random selection of one of the PDE4D7 correlated genes combined with one randomly selected immune defense response gene and one randomly selected T-Cell receptor signaling gene. The examples and FIGS. 15-32 demonstrate that a random selection of one of the PDE4D7 correlated genes combined with one randomly selected immune defense response gene and one randomly selected T-Cell receptor signaling gene, that were selected from the full set of genes suffice to make a significant prediction. These random selections make it plausible that any selection of one gene from each group allows for a significant prediction of the response of a prostate cancer subject to radiotherapy.

[0268] This section shows additional results for Cox regression models based on six different gene models comprising randomly selected combinations of three genes, wherein said three genes comprise per random combination of genes. In five of the six gene models (model 3.1, 3.2., 3.4. - 3.6) the random combination of genes comprises one immune defense response gene, one TCR signaling gene and one PDE4D7 correlated gene. In one reference model (model 3.3) the random combination of genes comprises two TCR signaling gene and one PDE4D7 correlated gene. The details for the variables and weights are displayed in TABLE 3.

TABLE 3

Variables and weights for the six gene Cox regression models, i.e. the five gene models comprising a randomly selected combination of three genes, having per random combination one immune defense response gene, one TCR signaling gene and one PDE4D7 correlated gene (model 3.1, 3.2., 3.4. -3.6) and one reference (model 3.3).

| | | PCAI-3 combinations regression models | | | | | |
|---|---|---|---|---|---|---|---|
| | Variable | 3.1 | 3.2 | 3.3 (reference) | 3.4 | 3.5 | 3.6 |
| Immune defense response genes | AIM2 | - | - | - | - | - | - |
| | APOBEC3A | - | - | - | - | - | - |
| | CIAO1 | - | - | - | - | - | - |
| | DDX58 | - | - | - | - | - | - |
| | DHX9 | - | - | - | - | - | - |
| | IFI16 | -0.3148 | - | - | - | - | - |
| | IFIT1 | - | - | - | - | - | -0.2293 |
| | IFIT3 | - | - | - | -0.1308 | - | - |
| | LRRFIP1 | - | -0.6686 | - | - | - | - |
| | MYD88 | - | - | - | - | - | - |
| | OAS1 | - | - | - | - | -0.07831 | - |
| | TLR8 | - | - | - | - | - | - |
| | ZBP1 | - | - | - | - | - | - |
| TCR signaling genes | CD2 | - | - | - | - | - | - |
| | CD247 | - | - | - | - | - | - |
| | CD28 | - | - | - | - | - | - |
| | CD3E | - | - | -0.06166 | - | - | - |
| | CD3G | - | - | - | - | - | - |
| | CD4 | - | - | - | - | - | - |
| | CSK | - | - | - | - | - | 0.1881 |
| | EZR | - | - | - | -0.1059 | - | - |
| | FYN | - | -0.1393 | - | - | - | - |
| | LAT | - | - | - | - | - | - |
| | LCK | - | - | - | - | - | - |
| | PAG1 | - | - | - | - | - | - |
| | PDE4D | - | - | -0.4176 | - | - | - |
| | PRKACA | 0.3535 | - | - | - | - | - |
| | PRKACB | - | - | - | - | - | - |
| | PTPRC | - | - | - | - | -0.2034 | - |
| | ZAP70 | - | - | - | - | - | - |
| PDE4D7 correlated genes | ABCC5 | - | - | - | 0.3185 | - | - |
| | CUX2 | - | 0.2883 | - | - | - | - |
| | KIAA1549 | - | - | - | - | - | - |
| | PDE4D | - | - | - | - | -0.3429 | - |
| | RAP1GAP2 | -0.4725 | - | - | - | - | - |
| | SLC39A11 | - | - | - | - | - | 0.3593 |
| | TDRD1 | - | - | - | - | - | - |
| | VWA2 | - | - | 0.1159 | - | - | - |

[0269] For Kaplan-Meier curve analysis the Cox regression function of the six risk models (PCAI-3.1 — 3.6) was tested for two RT dose levels (low (i.e., <=66 Gy) and high (i.e., >66 Gy)) based on the cut-off value of 66 Gy (see description of figures below). Prior to Kaplan-Meier curve analysis a categorization of the patient cohort was made into two sub-cohorts (low risk vs. high risk) based on a cut-off value (see description of figures). The 186 patient cohort with all patients undergoing SRT (salvage radiation treatment) after post-surgical BCR (biochemical recurrence) was tested for the endpoint: prostate cancer specific death (PCa Death) after start of SRT (salvage radiation) (FIGS. 12 — 23).

[0270] FIGS. 12 & 13 show a Kaplan-Meier curve for the PCAI-3.1 model. The clinical endpoint tested was PCa Death after start of SRT due to post-surgical disease recurrence. Subjects were stratified into two cohorts according to their risk to experience the clinical endpoint as predicted by PCAI-3.1 model (low (FIG. 12) vs. high (FIG. 13) risk). The value 0.04 was used as cut-off.

[0271] FIG. 12 shows stratification of low risk subjects by two RT dose levels (low (i.e., <=66 Gy) vs high (i.e., >66 Gy)) on their risk of experiencing the clinical endpoint as predicted by PCAI-3.1 model. The value 66 Gy was used as cut-off (logrank p=0.6; HR=1.9.1; CI=0.2-18.3). The following supplementary list indicate the number of subjects at risk for the analyzed PCAI-3.1 model classes, i.e. the subjects at risk at any time inverval +20 months after surgery are shown: Low dose class (<=66): 21, 21, 21, 19, 16, 9, 5, 3, 1, 0, 0; High dose class (>66): 29, 28, 25, 20, 15, 8, 7, 5, 2, 1, 0..

[0272] FIG. 13 shows stratification of high risk subjects by two RT dose levels (low (i.e., <=66 Gy) vs high (i.e., >66 Gy)) on their risk of experiencing the clinical endpoint as predicted by PCAI-3.1 model. The value 66 Gy was used as cut-off (logrank p=0.002; HR=16.4; CI=2.7-99). The following supplementary list indicate the number of subjects at risk for the analyzed PCAI-3.1 model classes, i.e. the subjects at risk at any time inverval +20 months after surgery are shown: Low dose class (<=66): 14, 13, 12, 11, 9, 5, 4, 3, 2, 1, 0; High dose class (>66): 34, 34, 33, 27, 24, 14, 10, 7, 5, 1, 0.

[0273] FIGS. 14 & 15 show a Kaplan-Meier curve for the PCAI-3.2 model. The clinical endpoint tested was PCa Death after start of SRT due to post-surgical disease recurrence. Subjects were stratified into two cohorts according to their risk to experience the clinical endpoint as predicted by PCAI-3.2 model (low (FIG. 14) vs. high (FIG. 15) risk). The value -0.1 was used as cut-off.

[0274] FIG. 14 shows stratification of low risk subjects by two RT dose levels (low (i.e., <=66 Gy) vs high (i.e., >66 Gy)) on their risk of experiencing the clinical endpoint as predicted by PCAI-3.2 model. The value 66 Gy was used as cut-off (logrank p=N/A; HR=N/A; CI=N/A). The following supplementary list indicate the number of subjects at risk for the analyzed PCAI-3.2 model classes, i.e. the subjects at risk at any time inverval +20 months after surgery are shown: Low dose class (<=66): 15, 15, 15, 14, 11, 7, 4, 2, 0, 0, 0; High dose class (>66): 30, 30, 29, 25, 21, 9, 7, 4, 2, 2, 0.

[0275] FIG. 15 shows stratification of high risk subjects by two RT dose levels (low (i.e., <=66 Gy) vs high (i.e., >66 Gy)) on their risk of experiencing the clinical endpoint as predicted by PCAI-3.2 model. The value 66 Gy was used as cut-off (logrank p=0.03; HR=4.5; CI=1.2 — 17.0). The following supplementary list indicate the number of subjects at risk for the analyzed PCAI-3.2 model classes, i.e. the subjects at risk at any time inverval +20 months after surgery are shown: Low dose class (<=66): 20, 19, 18, 16, 14, 7, 5, 4, 3, 10; High dose class (>66): 33, 32, 29, 22, 18, 13, 10, 8, 5, 0, 0.

[0276] FIGS. 16 & 17 show reference figures for the Kaplan-Meier curve for the PCAI-3.3 model. The clinical endpoint tested was PCa Death after start of SRT due to post-surgical disease recurrence. Subjects were stratified into two cohorts according to their risk to experience the clinical endpoint as predicted by reference PCAI-3.3 model (low (FIG. 16) vs. high (FIG. 17) risk).

[0277] The value 0.1 was used as cut-off.

[0278] FIG. 16 shows stratification of low risk subjects by two RT dose levels (low (i.e., <=66 Gy) vs high (i.e., >66 Gy)) on their risk of experiencing the clinical endpoint as predicted by PCAI-3.3 model. The value 66 Gy was used as cut-off (logrank p=0.6; HR=1.7; CI=0.2-12.9). The following supplementary list indicate the number of subjects at risk for the analyzed PCAI-3.3 model classes, i.e. the subjects at risk at any time inverval +20 months after surgery are shown: Low dose class (<=66): 19, 19, 19, 17, 14, 9, 6, 4, 2, 1, 0; High dose class (>66): 39, 38, 35, 30, 23, 13, 11, 7, 6, 1, 0.

[0279] FIG. 17 shows stratification of high risk subjects by two RT dose levels (low (i.e., <=66 Gy) vs high (i.e., >66 Gy)) on their risk of experiencing the clinical endpoint as predicted by PCAI-3.3 model. The value 66 Gy was used as cut-off (logrank p=N/A; HR=N/A; CI=N/A). The following supplementary list indicate the number of subjects at risk for the analyzed PCAI-3.3 model classes, i.e. the subjects at risk at any time inverval +20 months after surgery are shown: Low dose class (<=66): 16, 15, 14, 13, 11, 5, 3, 2, 1, 0, 0; High dose class (>66): 24, 24, 23, 17, 16, 9, 6, 5, 1, 1, 0.

[0280] FIGS. 18 & 19 show Kaplan-Meier curve for the PCAI-3.4 model. The clinical endpoint tested was PCa Death after start of SRT due to post-surgical disease recurrence. Subjects were stratified into two cohorts according to their risk to experience the clinical endpoint as predicted by PCAI-3.4 model (low (FIG. 18) vs. high (FIG. 19) risk).

[0281] The value 0.08 was used as cut-off.

[0282] FIG. 18 shows stratification of low risk subjects by two RT dose levels (low (i.e., <=66 Gy) vs high (i.e., >66 Gy)) on their risk of experiencing the clinical endpoint as predicted by PCAI-3.4 model. The value 66 Gy was used as cut-off (logrank p=0.9; HR=1.9; CI=0.08-8.9). The following supplementary list indicate the number of subjects at risk for the analyzed PCAI-3.4 model classes, i.e. the subjects at risk at any time inverval +20 months after surgery are shown: Low dose class (<=66): 15, 15, 15, 14, 12, 9, 7, 4, 3, 1, 0; High dose class (>66): 31, 30, 27, 22, 20, 12, 10, 8, 5, 1, 0.

[0283] FIG. 19 shows stratification of high risk subjects by two RT dose levels (low (i.e., <=66 Gy) vs high (i.e., >66 Gy)) on their risk of experiencing the clinical endpoint as predicted by PCAI-3.4 model. The value 66 Gy was used as cut-off (logrank p=N/A; HR=N/A; CI=N/A). The following supplementary list indicate the number of subjects at risk for the analyzed PCAI-3.4 model classes, i.e. the subjects at risk at any time inverval +20 months after surgery are shown: Low dose class (<=66): 20, 19, 18, 16, 13, 5, 2, 2, 0, 0, 0; High dose class (>66): 32, 32, 31, 25, 19, 10, 7, 4, 2, 1, 0.

[0284] FIGS. 20 & 21 show Kaplan-Meier curve for the PCAI-3.5 model. The clinical endpoint tested was PCa Death after start of SRT due to post-surgical disease recurrence. Subjects were stratified into two cohorts according to their risk to experience the clinical endpoint as predicted by PCAI-3.5 model (low (FIG. 20) vs. high (FIG. 21) risk). The value 0.08 was used as cut-off.

[0285] FIG. 20 shows stratification of low risk subjects by two RT dose levels (low (i.e., <=66 Gy) vs high (i.e., >66 Gy)) on their risk of experiencing the clinical endpoint as predicted by PCAI-3.5 model. The value 66 Gy was used as cut-off (logrank p=0.5; HR=2.2; CI=0.3-17.7). The following supplementary list indicate the number of subjects at risk for the analyzed PCAI-3.5 model classes, i.e. the subjects at risk at any time inverval +20 months after surgery are shown: Low dose class (<=66): 16, 16, 16, 14, 12, 8, 5, 3, 2, 1, 0; High dose class (>66): 41, 40, 37, 32, 24, 12, 11, 7, 6, 2, 0.

[0286] FIG. 21 shows stratification of high risk subjects by two RT dose levels (low (i.e., <=66 Gy) vs high (i.e., >66 Gy)) on their risk of experiencing the clinical endpoint as predicted by PCAI-3.5 model. The value 66 Gy was used as cut-off (logrank p=N/A; HR=N/A; CI=N/A). The following supplementary list indicate the number of subjects at risk for the analyzed PCAI-3.5 model classes, i.e. the subjects at risk at any time inverval +20 months after surgery are shown: Low dose class (<=66): 19, 18, 17, 6, 13, 6, 4, 3, 1, 0; High dose class (>66): 22, 22, 21, 15, 15, 10, 6, 5, 1, 0.

[0287] FIGS. 22 & 23 show Kaplan-Meier curve for the PCAI-3.5 model. The clinical endpoint tested was PCa Death after start of SRT due to post-surgical disease recurrence. Subjects were stratified into two cohorts according to their risk to experience the clinical endpoint as predicted by PCAI-3.6 model (low (FIG. 22) vs. high (FIG. 23) risk). The value -0.06 was used as cut-off.

[0288] FIG. 22 shows stratification of low risk subjects by two RT dose levels (low (i.e., <=66 Gy) vs high (i.e., >66 Gy)) on their risk of experiencing the clinical endpoint as predicted by PCAI-3.6 model. The value 66 Gy was used as cut-off (logrank p=N/A; HR=N/A; CI=N/A). The following supplementary list indicate the number of subjects at risk for the analyzed PCAI-3.6 model classes, i.e. the subjects at risk at any time inverval +20 months after surgery are shown: Low dose class (<=66): 20, 19, 19, 19, 16, 7, 5, 3, 1, 0, 0; High dose class (>66): 39, 38, 36, 31, 26, 13, 9, 7, 6, 2, 0.

[0289] FIG. 23 shows stratification of high risk subjects by two RT dose levels (low (i.e., <=66 Gy) vs high (i.e., >66 Gy)) on their risk of experiencing the clinical endpoint as predicted by PCAI-3.6 model. The value 66 Gy was used as cut-off (logrank p=0.05; HR=4.1; CI=1.0-17.0). The following supplementary list indicate the number of subjects at risk for the analyzed PCAI-3.6 model classes, i.e. the subjects at risk at any time inverval +20 months after surgery are shown: Low dose class (<=66): 15, 15, 14, 11, 9, 7, 4, 3, 2, 1, 0; High dose class (>66): 24, 24, 22, 16, 13, 9, 8, 5, 1, 0, 0.

[0290] The Kaplan-Meier analyses as shown in the FIGS. 12 - 23 demonstrate that a response of a prostate cancer subject to radiotherapy can be predicted and thus that a dose (low or high) dose can be selected for said prostate cancer subjects by using risk models that are based on a randomly selected combination of three genes, having per random combination one immune defense response gene, one TCR signaling gene and one PDE4D7 correlated gene and/or on a randomly selected combination of three genes, having per random combination two TCR signaling genes and one PDE4D7 correlated gene (FIGS. 16 & 17).

### Discussion

[0291] The effectiveness of both radical RT and SRT for localized prostate cancer is limited, resulting in disease progression and ultimately death of patients, especially for those at high risk of disease progression. The prediction of the therapy outcome is very complicated as many factors play a role in therapy effectiveness and disease recurrence. It is likely that important factors have not yet been identified, while the effect of others cannot be determined precisely. Multiple clinico-pathological measures are currently investigated and applied in a clinical setting to improve response prediction and therapy selection, providing some degree of improvement. Nevertheless, a strong need remains for better prediction of the response to radical RT and to SRT, in order to increase the success rate of these therapies.

[0292] We have identified molecules of which expression shows a significant relation to mortality after radical RT and SRT and therefore are expected to improve the prediction of the effectiveness of these treatments. An improved prediction of effectiveness of RT for each patient be it in the radical or the salvage setting, will improve therapy selection and potentially survival. This can be achieved by 1) optimizing RT for those patients where RT is predicted to be effective (e.g. by dose escalation or a different starting time) and 2) guiding patients where RT is predicted not to be effective to an alternative, potentially more effective form of treatment. Further, this would reduce suffering for those patients who would be spared ineffective therapy and would reduce cost spent on ineffective therapies.

[0293] Further, next to applying risk stratification to patients with recurrent or advanced prostate cancers personalization of treatment is an unmet need. Radiation dose regimes used today are arbitrarily selected based on e.g. size and location of the cancer while tumor biology is not taken into consideration. However, dose levels to the pelvic bead to treat recurrent prostate cancers beyond a certain total dose range are typically inducing severe side effects like genito-urinary or gastrointestinal adverse reactions. The number of patients who may suffer from these side effects increases exponentially with every additional Gy of RT dose applied. Therefore, it is of utmost importance to the patient to keep the dose as low as possible while at the same time ensuring tumor growth control in a longitudinal manner. Dose escalation for biologically high-risk patients or dose de-escalation for biologically low-risk patients is therefore key to optimally balance and personalize tumor progression vs. treatment toxicity in prostate SRT.

[0294] Other variations to the disclosed realizations can be understood and effected by those skilled in the art in practicing the claimed invention, from a study of the drawings, the disclosure, and the appended claims.

[0295] In the claims, the word “comprising” does not exclude other elements or steps, and the indefinite article “a” or “an” does not exclude a plurality.

[0296] One or more steps of the method illustrated in FIG. 1 may be implemented in a computer program product that may be executed on a computer. The computer program product may comprise a non-transitory computer-readable recording medium on which a control program is recorded (stored), such as a disk, hard drive, or the like. Common forms of non-transitory computer-readable media include, for example, floppy disks, flexible disks, hard disks, magnetic tape, or any other magnetic storage medium, CD-ROM, DVD, or any other optical medium, a RAM, a PROM, an EPROM, a FLASH-EPROM, or other memory chip or cartridge, or any other non-transitory medium from which a computer can read and use.

[0297] Alternatively, the one or more steps of the method may be implemented in transitory media, such as a transmittable carrier wave in which the control program is embodied as a data signal using transmission media, such as acoustic or light waves, such as those generated during radio wave and infrared data communications, and the like.

[0298] The exemplary method may be implemented on one or more general purpose computers, special purpose computer(s), a programmed microprocessor or microcontroller and peripheral integrated circuit elements, an ASIC or other integrated circuit, a digital signal processor, a hardwired electronic or logic circuit such as a discrete element circuit, a programmable logic device such as a PLD, PLA, FPGA, Graphical card CPU (GPU), or PAL, or the like. In general, any device, capable of implementing a finite state machine that is in turn capable of implementing the flowchart shown in FIG. 1, can be used to implement one or more steps of the method of risk stratification for therapy selection in a patient with prostate cancer is illustrated. As will be appreciated, while the steps of the method may all be computer implemented, in some embodiments one or more of the steps may be at least partially performed manually.

[0299] The computer program instructions may also be loaded onto a computer, other programmable data processing apparatus, or other devices to cause a series of operational steps to be performed on the computer, other programmable apparatus or other devices to produce a computer implemented process such that the instructions which execute on the computer or other programmable apparatus provide processes for implementing the functions/acts specified herein.

[0300] Any reference signs in the claims should not be construed as limiting the scope.

[0301] The invention relates to a method of selecting a dose for a radiotherapy of a prostate cancer subject, comprising determining or receiving the result of a determination of a first gene expression profile for each of one or more, for example, 1, 2, 3, 4, 5, 6, 7, 8, 9, 10, 11, 12, 13 or all, immune defense response genes selected from the group consisting of: AIM2, APOBEC3A, CIAO1, DDX58, DHX9, IFI16, IFIH1, IFIT1, IFIT3, LRRFIP1, MYD88, OAS1, TLR8, and ZBP1, said first gene expression profile(s) being determined in a biological sample obtained from the subject, and/or determining or receiving the result of a determination of a second gene expression profile for each of one or more, for example, 1, 2, 3, 4, 5, 6, 7, 8, 9, 10, 11, 12, 13, 14, 15, 16 or all, T-Cell receptor signaling genes selected from the group consisting of: CD2, CD247, CD28, CD3E, CD3G, CD4, CSK, EZR, FYN, LAT, LCK, PAG1, PDE4D, PRKACA, PRKACB, PTPRC, and ZAP70, said second gene expression profile(s) being determined in a biological sample obtained from the subject, and/or determining or receiving the result of a determination of a third gene expression profile for each of one or more, for example, 1, 2, 3, 4, 5, 6, 7 or all, PDE4D7 correlated genes selected from the group consisting of: ABCC5, CUX2, KIAA1549, PDE4D, RAP1GAP2, SLC39A11, TDRD1, and VWA2, said third gene expression profile(s) being determined in a biological sample obtained from the subject, determining the selection of the radiotherapy dose based on the first gene expression profile(s), or on the second gene expression profile(s), or on the third gene expression profile(s), or on the first, second, and third gene expression profile(s), and, optionally, providing the selection or a therapy recommendation based on the selection to a medical caregiver or the subject. Since the status of the immune system and of the immune microenvironment have an impact on therapy effectiveness, the ability to identify markers predictive for this effect might help to be better able to predict overall RT response. The identified genes were found to exhibit a significant correlation with outcome after SRT; furthermore, SRT dose was identified as a predictor of post-SRT prostate cancer specific survival. Therefore, we expect that they will provide predictive value with regard to the effectiveness of radical RT and/or SRT as well as provide decision support for dose regime selection in SRT based on the biological disease progression risk of a patient. The attached Sequence Listing, entitled 2020PF00494_Sequence Listing_ST25 is incorporated herein by reference, in its entirety.

1. A method of selecting a dose for radiotherapy of a prostate cancer subject, comprising:
determining or receiving the result of a determination of a first gene expression profile for each of one or more, for example, 1, 2, 3, 4, 5, 6, 7, 8, 9, 10, 11, 12, 13 or all, immune defense response genes selected from the group consisting of: AIM2, APOBEC3A, CIAO1, DDX58, DHX9, IFI16, IFIH1, IFIT1, IFIT3, LRRFIP1, MYD88, OAS1, TLR8, and ZBP1, said first gene expression profile(s) being determined in a biological sample obtained from the subject, and
determining or receiving the result of a determination of a second gene expression profile for each of one or more, for example, 1, 2, 3, 4, 5, 6, 7, 8, 9, 10, 11, 12, 13, 14, 15, 16 or all, T-Cell receptor signaling genes selected from the group consisting of: CD2, CD247, CD28, CD3E, CD3G, CD4, CSK, EZR, FYN, LAT, LCK, PAG1, PDE4D, PRKACA, PRKACB, PTPRC, and ZAP70, said second gene expression profile(s) being determined in a biological sample obtained from the subject, and
determining or receiving the result of a determination of a third gene expression profile for each of one or more, for example, 1, 2, 3, 4, 5, 6, 7 or all, PDE4D7 correlated genes selected from the group consisting of: ABCC5, CUX2, KIAA1549, PDE4D, RAP1GAP2, SLC39A11, TDRD1, and VWA2, said third gene expression profile(s) being determined in a biological sample obtained from the subject,
determining the selection of the radiotherapy dose based on the first gene expression profile(s), or on the second gene expression profile(s), or on the third gene expression profile(s), or on the first, second, and third gene expression profile(s), and
optionally, providing the selection or a therapy recommendation based on the selection to a medical caregiver or the subject.

2. The method as defined in claim 1, wherein:
the one or more immune defense response genes comprise three or more, preferably, six or more, more preferably, nine or more, most preferably, all of the immune defense genes, and/or
the one or more T-Cell receptor signaling genes comprise three or more, preferably, six or more, more preferably, nine or more, most preferably, all of the T-Cell receptor signaling genes, and/or
the one or more PDE4D7 correlated genes comprise three or more, preferably, six or more, most preferably, all of the PDE4D7 correlated genes.

3. The method as defined in claim 1, wherein the determining of the selection of the radiotherapy dose comprises:
combining the first gene expression profiles for two or more, for example, 2, 3, 4, 5, 6, 7, 8, 9, 10, 11, 12, 13 or all, of the immune defense response genes with a regression function that had been derived from a population of prostate cancer subjects, and/or
combining the second gene expression profiles for two or more, for example, 2, 3, 4, 5, 6, 7, 8, 9, 10, 11, 12, 13, 14, 15, 16 or all, of the T-Cell receptor signaling genes with a regression function that had been derived from a population of prostate cancer subjects, and/or
combining the third gene expression profiles for two or more, for example, 2, 3, 4, 5, 6, 7 or all, of the PDE4D7 correlated genes with a regression function that had been derived from a population of prostate cancer subjects.

4. The method as defined in claim 3, wherein the determining of the selection of the radiotherapy dose further comprises combining the combination of the first gene expression profiles, the combination of the second gene expression profiles, and the combination of the third gene expression profiles with a regression function that had been derived from a population of prostate cancer subjects.

5. The method as defined in claim 1, wherein the determining of the selection of the radiotherapy dose is further based on one or more clinical parameters obtained from the subject.

6. The method as defined in claim 5, wherein the clinical parameters comprise one or more of: (i) a prostate-specific antigen (PSA) level; (ii) a pathologic Gleason score (pGS); (iii) a clinical tumour stage; (iv) a pathological Gleason grade group (pGGG); (v) a pathological stage; (vi) one or more pathological variables, for example, a status of surgical margins and/or a lymph node invasion and/or an extra-prostatic growth and/or a seminal vesicle invasion; (vii) CAPRA; (viii) CAPRA-S; (ix) EAU-BCR risk groups, and; (x) another clinical risk score.

7. The method as defined in claim 5, wherein the determining of the selection of the radiotherapy dose comprises combining one or more of: (i) the first gene expression profile(s) for the one or more immune defense response genes; (ii) the second gene expression profile(s) for the one or more T-Cell receptor signaling genes; (iii) the third gene expression profile(s) for the one or more PDE4D7 correlated genes, and; (iv) the combination of the first gene expression profiles, the combination of the second gene expression profiles, and the combination of the third gene expression profiles, and the one or more clinical parameters obtained from the subject with a regression function that had been derived from a population of prostate cancer subjects.

8. The method as defined in claim 1, wherein the biological sample(s) is/are obtained from the subject before the start of the radiotherapy.

9. The method as defined in claim 1, wherein the radiotherapy is radical radiotherapy or salvage radiotherapy.

10. The method according to claim 1, wherein the prostate cancer subject is a prostate cancer subject undergoing salvage radiotherapy (SRT) after post-surgical disease recurrence.

11. A computer program product comprising instructions which, when the program is executed by a computer, cause the computer to carry out a method comprising:
receiving data indicative of a first gene expression profile for each of one or more, for example, 1, 2, 3, 4, 5, 6, 7, 8, 9, 10, 11, 12, 13 or all, immune defense response genes selected from the group consisting of: AIM2, APOBEC3A, CIAO1, DDX58, DHX9, IFI16, IFIH1, IFIT1, IFIT3, LRRFIP1, MYD88, OAS1, TLR8, and ZBP1, said first gene expression profile(s) being determined in a biological sample obtained from the subject, and of a second gene expression profile for each of one or more, for example, 1, 2, 3, 4, 5, 6, 7, 8, 9, 10, 11, 12, 13, 14, 15, 16 or all, T-Cell receptor signaling genes selected from the group consisting of: CD2, CD247, CD28, CD3E, CD3G, CD4, CSK, EZR, FYN, LAT, LCK, PAG1, PDE4D, PRKACA, PRKACB, PTPRC, and ZAP70, said second gene expression profile(s) being determined in a biological sample obtained from the subject, and of a third gene expression profile for each of one or more, for example, 1, 2, 3, 4, 5, 6, 7 or all, PDE4D7 correlated genes selected from the group consisting of: ABCC5, CUX2, KIAA1549, PDE4D, RAP1GAP2, SLC39A11, TDRD1, and VWA2, said third gene expression profile(s) being determined in a biological sample obtained from the subject, and
determining a selection of a dose for radiotherapy of a prostate cancer subject based on the first gene expression profile(s), or on the second gene expression profile(s), or on the third gene expression profile(s), or on the first, second, and third gene expression profile(s) .

12. An apparatus for selecting a dose for radiotherapy of a prostate cancer subject, comprising:
an input adapted to receive data indicative of a first gene expression profile for each of one or more, for example, 1, 2, 3, 4, 5, 6, 7, 8, 9, 10, 11, 12, 13 or all, immune defense response genes selected from the group consisting of: AIM2, APOBEC3A, CIAO1, DDX58, DHX9, IFI16, IFIH1, IFIT1, IFIT3, LRRFIP1, MYD88, OAS1, TLR8, and ZBP1, said first gene expression profile(s) being determined in a biological sample obtained from the subject, and of a second gene expression profile for each of one or more, for example, 1, 2, 3, 4, 5, 6, 7, 8, 9, 10, 11, 12, 13, 14, 15, 16 or all, T-Cell receptor signaling genes selected from the group consisting of: CD2, CD247, CD28, CD3E, CD3G, CD4, CSK, EZR, FYN, LAT, LCK, PAG1, PDE4D, PRKACA, PRKACB, PTPRC, and ZAP70, said second gene expression profile(s) being determined in a biological sample obtained from the subject, and of a third gene expression profile for each of one or more, for example, 1, 2, 3, 4, 5, 6, 7 or all, PDE4D7 correlated genes selected from the group consisting of: ABCC5, CUX2, KIAA1549, PDE4D, RAP1GAP2, SLC39A11, TDRD1, and VWA2, said third gene expression profile(s) being determined in a biological sample obtained from the subject,
a processor adapted to determine the selection of the radiotherapy dose based on the first gene expression profile(s), or on the second gene expression profile(s), or on the third gene expression profile(s), or on the first, second, and third gene expression profile(s), and
a computer program product comprising instructions which, when the program is executed by a computer, cause the computer to carry out a method comprising:
receiving data indicative of a first gene expression profile for each of one or more, for example, 1, 2, 3, 4, 5, 6, 7, 8, 9, 10, 11, 12, 13 or all, immune defense response genes selected from the group consisting of: AIM2, APOBEC3A, CIAO1, DDX58, DHX9, IFI16, IFIH1, IFIT1, IFIT3, LRRFIP1, MYD88, OAS1, TLR8, and ZBP1, said first gene expression profile(s) being determined in a biological sample obtained from the subject, and of a second gene expression profile for each of one or more, for example, 1, 2, 3, 4, 5, 6, 7, 8, 9, 10, 11, 12, 13, 14, 15, 16 or all, T-Cell receptor signaling genes selected from the group consisting of: CD2, CD247, CD28, CD3E, CD3G, CD4, CSK, EZR, FYN, LAT, LCK, PAG1, PDE4D, PRKACA, PRKACB, PTPRC, and ZAP70, said second gene expression profile(s) being determined in a biological sample obtained from the subject, and of a third gene expression profile for each of one or more, for example, 1, 2, 3, 4, 5, 6, 7 or all, PDE4D7 correlated genes selected from the group consisting of: ABCC5, CUX2, KIAA1549, PDE4D, RAP1GAP2, SLC39A11, TDRD1, and VWA2, said third gene expression profile(s) being determined in a biological sample obtained from the subject, and
determining a selection of a dose for radiotherapy of a prostate cancer subject based on the first gene expression profile(s), or on the second gene expression profile(s), or on the third gene expression profile(s), or on the first, second, and third gene expression profile(s) .

13. A diagnostic kit, comprising:
at least one primer and probe for determining a first gene expression profile for each of one or more, for example, 1, 2, 3, 4, 5, 6, 7, 8, 9, 10, 11, 12, 13 or all, immune defense response genes selected from the group consisting of: AIM2, APOBEC3A, CIAO1, DDX58, DHX9, IFI16, IFIH1, IFIT1, IFIT3, LRRFIP1, MYD88, OAS1, TLR8, and ZBP1, in a biological sample obtained from the subject,
at least one primer and probe for determining a second gene expression profile for each of one or more, for example, 1, 2, 3, 4, 5, 6, 7, 8, 9, 10, 11, 12, 13, 14, 15, 16 or all, T-Cell receptor signaling genes selected from the group consisting of: CD2, CD247, CD28, CD3E, CD3G, CD4, CSK, EZR, FYN, LAT, LCK, PAG1, PDE4D, PRKACA, PRKACB, PTPRC, and ZAP70, in a biological sample obtained from the subject, and
at least one primer and probe for determining a third gene expression profile for each of one or more, for example, 1, 2, 3, 4, 5, 6, 7 or all, PDE4D7 correlated genes selected from the group consisting of: ABCC5, CUX2, KIAA1549, PDE4D, RAP1GAP2, SLC39A11, TDRD1, and VWA2, in a biological sample obtained from the subject .

14. Use of the kit as defined in claim 13.

15. The use as defined in claim 14 in a method of selecting a dose for radiotherapy of a prostate cancer subject.

16. A method, comprising:
receiving one or more biological sample(s) obtained from a prostate cancer subject,
using the kit as defined in claim 13 to determine a first gene expression profile for each of one or more, for example, 1, 2, 3, 4, 5, 6, 7, 8, 9, 10, 11, 12, 13 or all, immune defense response genes selected from the group consisting of: AIM2, APOBEC3A, CIAO1, DDX58, DHX9, IFI16, IFIH1, IFIT1, IFIT3, LRRFIP1, MYD88, OAS1, TLR8, and ZBP1, in a biological sample obtained from the subject, and
using a diagnostic kit to determine a second gene expression profile for each of one or more, for example, 1, 2, 3, 4, 5, 6, 7, 8, 9, 10, 11, 12, 13, 14, 15, 16 or all, T-Cell receptor signaling genes selected from the group consisting of: CD2, CD247, CD28, CD3E, CD3G, CD4, CSK, EZR, FYN, LAT, LCK, PAG1, PDE4D, PRKACA, PRKACB, PTPRC, and ZAP70, in a biological sample obtained from the subject, and
using the diagnostic kit to determine a third gene expression profile for each of one or more, for example, 1, 2, 3, 4, 5, 6, 7 or all, PDE4D7 correlated genes selected from the group consisting of: ABCC5, CUX2, KIAA1549, PDE4D, RAP1GAP2, SLC39A11, TDRD1, and VWA2, in a biological sample obtained from the subject,
wherein the diagnostic kit comprises:
at least one primer and probe for determining a first gene expression profile for each of one or more, for example, 1, 2, 3, 4, 5, 6, 7, 8, 9, 10, 11, 12, 13 or all, immune defense response genes selected from the group consisting of: AIM2, APOBEC3A, CIAO1, DDX58, DHX9, IFI16, IFIH1, IFIT1, IFIT3, LRRFIP1, MYD88, OAS1, TLR8, and ZBP1, in a biological sample obtained from the subject,
at least one primer and probe for determining a second gene expression profile for each of one or more, for example, 1, 2, 3, 4, 5, 6, 7, 8, 9, 10, 11, 12, 13, 14, 15, 16 or all, T-Cell receptor signaling genes selected from the group consisting of: CD2, CD247, CD28, CD3E, CD3G, CD4, CSK, EZR, FYN, LAT, LCK, PAG1, PDE4D, PRKACA, PRKACB, PTPRC, and ZAP70, in a biological sample obtained from the subject, and
at least one primer and probe for determining a third gene expression profile for each of one or more, for example, 1, 2, 3, 4, 5, 6, 7 or all, PDE4D7 correlated genes selected from the group consisting of: ABCC5, CUX2, KIAA1549, PDE4D, RAP1GAP2, SLC39A11, TDRD1, and VWA2, in a biological sample obtained from the subject.

17. Use of the computer program product according to claim 11 for using a first gene expression profile for each of one or more, for example, 1, 2, 3, 4, 5, 6, 7, 8, 9, 10, 11, 12, 13 or all, immune defense response genes selected from the group consisting of: AIM2, APOBEC3A, CIAO1, DDX58, DHX9, IFI16, IFIH1, IFIT1, IFIT3, LRRFIP1, MYD88, OAS1, TLR8, and ZBP1, and a second gene expression profile for each of one or more, for example, 1, 2, 3, 4, 5, 6, 7, 8, 9, 10, 11, 12, 13, 14, 15, 16 or all, T-Cell receptor signaling genes selected from the group consisting of: CD2, CD247, CD28, CD3E, CD3G, CD4, CSK, EZR, FYN, LAT, LCK, PAG1, PDE4D, PRKACA, PRKACB, PTPRC, and ZAP70, and a third gene expression profile for each of one or more, for example, 1, 2, 3, 4, 5, 6, 7 or all, PDE4D7 correlated genes selected from the group consisting of: ABCC5, CUX2, KIAA1549, PDE4D, RAP1GAP2, SLC39A11, TDRD1, and VWA2, in a method of selecting a dose for radiotherapy of a prostate cancer subject, comprising:
determining the selection of the radiotherapy dose based on the first gene expression profile(s), or on the second gene expression profile(s), or on the third gene expression profile(s), or on the first, second, and third gene expression profile(s) .

18. Use of the apparatus according to claim 12 for using a first gene expression profile for each of one or more, for example, 1, 2, 3, 4, 5, 6, 7, 8, 9, 10, 11, 12, 13 or all, immune defense response genes selected from the group consisting of: AIM2, APOBEC3A, CIAO1, DDX58, DHX9, IFI16, IFIH1, IFIT1, IFIT3, LRRFIP1, MYD88, OAS1, TLR8, and ZBP1, and a second gene expression profile for each of one or more, for example, 1, 2, 3, 4, 5, 6, 7, 8, 9, 10, 11, 12, 13, 14, 15, 16 or all, T-Cell receptor signaling genes selected from the group consisting of: CD2, CD247, CD28, CD3E, CD3G, CD4, CSK, EZR, FYN, LAT, LCK, PAG1, PDE4D, PRKACA, PRKACB, PTPRC, and ZAP70, and a third gene expression profile for each of one or more, for example, 1, 2, 3, 4, 5, 6, 7 or all, PDE4D7 correlated genes selected from the group consisting of: ABCC5, CUX2, KIAA1549, PDE4D, RAP1GAP2, SLC39A11, TDRD1, and VWA2, in a method of selecting a dose for radiotherapy of a prostate cancer subject, comprising:
determining the selection of the radiotherapy dose based on the first gene expression profile(s), or on the second gene expression profile(s), or on the third gene expression profile(s), or on the first, second, and third gene expression profile(s).

19. The computer program product according to claim 11 wherein the method further comprises providing the selection or a therapy recommendation based on the selection to a medical caregiver or the subject.

20. The apparatus according to claim 12 further comprising a providing unit adapted to provide the selection or a therapy recommendation based on the selection to a medical caregiver or the subject.

21. The diagnostic kit according to claim 13 further comprising an apparatus for selecting a dose for radiotherapy of a prostate cancer subject, comprising:
an input adapted to receive data indicative of a first gene expression profile for each of one or more, for example, 1, 2, 3, 4, 5, 6, 7, 8, 9, 10, 11, 12, 13 or all, immune defense response genes selected from the group consisting of: AIM2, APOBEC3A, CIAO1, DDX58, DHX9, IFI16, IFIH1, IFIT1, IFIT3, LRRFIP1, MYD88, OAS1, TLR8, and ZBP1, said first gene expression profile(s) being determined in a biological sample obtained from the subject, and of a second gene expression profile for each of one or more, for example, 1, 2, 3, 4, 5, 6, 7, 8, 9, 10, 11, 12, 13, 14, 15, 16 or all, T-Cell receptor signaling genes selected from the group consisting of: CD2, CD247, CD28, CD3E, CD3G, CD4, CSK, EZR, FYN, LAT, LCK, PAG1, PDE4D, PRKACA, PRKACB, PTPRC, and ZAP70, said second gene expression profile(s) being determined in a biological sample obtained from the subject, and of a third gene expression profile for each of one or more, for example, 1, 2, 3, 4, 5, 6, 7 or all, PDE4D7 correlated genes selected from the group consisting of: ABCC5, CUX2, KIAA1549, PDE4D, RAP1GAP2, SLC39A11, TDRD1, and VWA2, said third gene expression profile(s) being determined in a biological sample obtained from the subject,
a processor adapted to determine the selection of the radiotherapy dose based on the first gene expression profile(s), or on the second gene expression profile(s), or on the third gene expression profile(s), or on the first, second, and third gene expression profile(s), and
a computer program product comprising instructions which, when the program is executed by a computer, cause the computer to carry out a method comprising:
receiving data indicative of a first gene expression profile for each of one or more, for example, 1, 2, 3, 4, 5, 6, 7, 8, 9, 10, 11, 12, 13 or all, immune defense response genes selected from the group consisting of: AIM2, APOBEC3A, CIAO1, DDX58, DHX9, IFI16, IFIH1, IFIT1, IFIT3, LRRFIP1, MYD88, OAS1, TLR8, and ZBP1, said first gene expression profile(s) being determined in a biological sample obtained from the subject, and of a second gene expression profile for each of one or more, for example, 1, 2, 3, 4, 5, 6, 7, 8, 9, 10, 11, 12, 13, 14, 15, 16 or all, T-Cell receptor signaling genes selected from the group consisting of: CD2, CD247, CD28, CD3E, CD3G, CD4, CSK, EZR, FYN, LAT, LCK, PAG1, PDE4D, PRKACA, PRKACB, PTPRC, and ZAP70, said second gene expression profile(s) being determined in a biological sample obtained from the subject, and of a third gene expression profile for each of one or more, for example, 1, 2, 3, 4, 5, 6, 7 or all, PDE4D7 correlated genes selected from the group consisting of: ABCC5, CUX2, KIAA1549, PDE4D, RAP1GAP2, SLC39A11, TDRD1, and VWA2, said third gene expression profile(s) being determined in a biological sample obtained from the subject, and
determining a selection of a dose for radiotherapy of a prostate cancer subject based on the first gene expression profile(s), or on the second gene expression profile(s), or on the third gene expression profile(s), or on the first, second, and third gene expression profile(s).

22. The diagnostic kit according to claim 13 further comprising a computer program product comprising instructions which, when the program is executed by a computer, cause the computer to carry out a method comprising:
receiving data indicative of a first gene expression profile for each of one or more, for example, 1, 2, 3, 4, 5, 6, 7, 8, 9, 10, 11, 12, 13 or all, immune defense response genes selected from the group consisting of: AIM2, APOBEC3A, CIAO1, DDX58, DHX9, IFI16, IFIH1, IFIT1, IFIT3, LRRFIP1, MYD88, OAS1, TLR8, and ZBP1, said first gene expression profile(s) being determined in a biological sample obtained from the subject, and of a second gene expression profile for each of one or more, for example, 1, 2, 3, 4, 5, 6, 7, 8, 9, 10, 11, 12, 13, 14, 15, 16 or all, T-Cell receptor signaling genes selected from the group consisting of: CD2, CD247, CD28, CD3E, CD3G, CD4, CSK, EZR, FYN, LAT, LCK, PAG1, PDE4D, PRKACA, PRKACB, PTPRC, and ZAP70, said second gene expression profile(s) being determined in a biological sample obtained from the subject, and of a third gene expression profile for each of one or more, for example, 1, 2, 3, 4, 5, 6, 7 or all, PDE4D7 correlated genes selected from the group consisting of: ABCC5, CUX2, KIAA1549, PDE4D, RAP1GAP2, SLC39A11, TDRD1, and VWA2, said third gene expression profile(s) being determined in a biological sample obtained from the subject, and
determining a selection of a dose for radiotherapy of a prostate cancer subject based on the first gene expression profile(s), or on the second gene expression profile(s), or on the third gene expression profile(s), or on the first, second, and third gene expression profile(s).

23. The use as defined in claim 17 wherein the method further comprises providing the selection or a therapy recommendation based on the selection to a medical caregiver or the subject.

24. The use as defined in claim 18 wherein the method further comprises providing the selection or a therapy recommendation based on the selection to a medical caregiver or the subject.

The application's sequence listing, which the Patent Office published only in electronic form, follows.

SEQUENCE LISTING (166 sequences)

SEQ ID NO: 1 - DNA, 2009 bp, Homo sapiens
gggaatgctttgtgcagcgcgcttgcgcggtgtggcggccgatgccgctataaaggcttgttttgctgcagggctcatgctcgggagcgtggttgagcggctggcgcggttgtcctggagcaggggcgcaggaattctgatgtgaaactaacagtctgtgagccctggaacctccactcagagaagatgaaggatatcgacataggaaaagagtatatcatccccagtcctgggtatagaagtgtgagggagagaaccagcacttctgggacgcacagagaccgtgaagattccaagttcaggagaactcgaccgttggaatgccaagatgccttggaaacagcagcccgagccgagggcctctctcttgatgcctccatgcattctcagctcagaatcctggatgaggagcatcccaagggaaagtaccatcatggcttgagtgctctgaagcccatccggactacttccaaacaccagcacccagtggacaatgctgggcttttttcctgtatgactttttcgtggctttcttctctggcccgtgtggcccacaagaagggggagctctcaatggaagacgtgtggtctctgtccaagcacgagtcttctgacgtgaactgcagaagactagagagactgtggcaagaagagctgaatgaagttgggccagacgctgcttccctgcgaagggttgtgtggatcttctgccgcaccaggctcatcctgtccatcgtgtgcctgatgatcacgcagctggctggcttcagtggaccaaattttcaggatggctgtattctgcggtcagaatgagagagtcaagctgggcagaatctctcgccaagagttcagccttcctttggagactgctccatcagtgccgaggtgtgtgggaacaggcttcactgcaccgccatcttactgagttgcttcacgtgaggaaaagggggctttggccctgtgactcagttccacattttggattgcatactggaaaagaagccaatcttcttgctagtaaaccagcaacccggctgtatacagtggtgacccaagcaatggatataaacctaaaaatctgagggaggggagaggtggaatacagtagttcttggaatctgaagtctcctatttgatcaggttatttcctgggacttggcaaaaatctgattggtggggatctcctaggacctagtggacatctggtattaatttaatctcaggaaaaacaagaaattaacccagagagagtctgggttttggaattcagcgtagctacctccagaccgtggtgtctggcctccatttttgtctgtcattcagctctgacttacagctgcagtcacctttgctataaggcacctgggtagaagggtggatgggcttcacatcaatttttttcttcctttagggtgggggattggtttggctttcttttgttgtggttttttgttttatttttgtcaagattgatttttagatgcaaggacttgaaaagacccagaaggatgccaccagtttttccttgaggcctaggattttttattctgtcccgagcagaggtaattcctcacaacttagtgcaccagtagcaccagccattttgagcagagtacctctttggggagcttttcgttttgttttgtttttaattctctttccttagcagcaaggtcttttttcctagagaatctactccgttgcagaatcattgcaacctcaggagccctcactgattgagtgctgtcagcctgatatactactttggactctggaaacagatatgggttctattctctatttctactgtgtgtcgttaaacaaccgtcggagaccagatgacctgttagatggctagtcctgtataactcgactctgtatgtttcaatgtatgttactgcaatgcttcacctgctgtacagtgtttgtgagatgctctttgaagatggtacttttatattttttcattttcaataaaagtacattccttcccacaaaaaaaaaaaaaa

SEQ ID NO: 2 - DNA, 5872 bp, Homo sapiens
gggaatgctttgtgcagcgcgcttgcgcggtgtggcggccgatgccgctataaaggcttgttttgctgcagggctcatgctcgggagcgtggttgagcggctggcgcggttgtcctggagcaggggcgcaggaattctgatgtgaaactaacagtctgtgagccctggaacctccactcagagaagatgaaggatatcgacataggaaaagagtatatcatccccagtcctgggtatagaagtgtgagggagagaaccagcacttctgggacgcacagagaccgtgaagattccaagttcaggagaactcgaccgttggaatgccaagatgccttggaaacagcagcccgagccgagggcctctctcttgatgcctccatgcattctcagctcagaatcctggatgaggagcatcccaagggaaagtaccatcatggcttgagtgctctgaagcccatccggactacttccaaacaccagcacccagtggacaatgctgggcttttttcctgtatgactttttcgtggctttcttctctggcccgtgtggcccacaagaagggggagctctcaatggaagacgtgtggtctctgtccaagcacgagtcttctgacgtgaactgcagaagactagagagactgtggcaagaagagctgaatgaagttgggccagacgctgcttccctgcgaagggttgtgtggatcttctgccgcaccaggctcatcctgtccatcgtgtgcctgatgatcacgcagctggctggcttcagtggaccagccttcatggtgaaacacctcttggagtatacccaggcaacagagtctaacctgcagtacagcttgttgttagtgctgggcctcctcctgacggaaatcgtgcggtcttggtcgcttgcactgacttgggcattgaattaccgaaccggtgtccgcttgcggggggccatcctaaccatggcatttaagaagatccttaagttaaagaacattaaagagaaatccctgggtgagctcatcaacatttgctccaacgatgggcagagaatgtttgaggcagcagccgttggcagcctgctggctggaggacccgttgttgccatcttaggcatgatttataatgtaattattctgggaccaacaggcttcctgggatcagctgtttttatcctcttttacccagcaatgatgtttgcatcacggctcacagcatatttcaggagaaaatgcgtggccgccacggatgaacgtgtccagaagatgaatgaagttcttacttacattaaatttatcaaaatgtatgcctgggtcaaagcattttctcagagtgttcaaaaaatccgcgaggaggagcgtcggatattggaaaaagctgggtacttccagagcatcactgtgggtgtggctcccattgtggtggtgattgccagcgtggtgaccttctctgttcatatgaccctgggcttcgatctgacagcagcacaggctttcacagtggtgacagtcttcaattccatgacttttgctttgaaagtaacaccgttttcagtaaagtccctctcagaagcctcagtggctgttgacagatttaagagtttgtttctaatggaagaggttcacatgataaagaacaaaccagccagtcctcacatcaagatagagatgaaaaatgccaccttggcatgggactcctcccactccagtatccagaactcgcccaagctgacccccaaaatgaaaaaagacaagagggcttccaggggcaagaaagagaaggtgaggcagctgcagcgcactgagcatcaggcggtgctggcagagcagaaaggccacctcctcctggacagtgacgagcggcccagtcccgaagaggaagaaggcaagcacatccacctgggccacctgcgcttacagaggacactgcacagcatcgatctggagatccaagagggtaaactggttggaatctgtggcagtgtgggaagtggaaaaacctctctcatttcagccattttaggccagatgacgcttctagagggcagcattgcaatcagtggaaccttcgcttatgtggcccagcaggcctggatcctcaatgctactctgagagacaacatcctgtttgggaaggaatatgatgaagaaagatacaactctgtgctgaacagctgctgcctgaggcctgacctggccattcttcccagcagcgacctgacggagattggagagcgaggagccaacctgagcggtgggcagcgccagaggatcagccttgcccgggccttgtatagtgacaggagcatctacatcctggacgaccccctcagtgccttagatgcccatgtgggcaaccacatcttcaatagtgctatccggaaacatctcaagtccaagacagttctgtttgttacccaccagttacagtacctggttgactgtgatgaagtgatcttcatgaaagagggctgtattacggaaagaggcacccatgaggaactgatgaatttaaatggtgactatgctaccatttttaataacctgttgctgggagagacaccgccagttgagatcaattcaaaaaaggaaaccagtggttcacagaagaagtcacaagacaagggtcctaaaacaggatcagtaaagaaggaaaaagcagtaaagccagaggaagggcagcttgtgcagctggaagagaaagggcagggttcagtgccctggtcagtatatggtgtctacatccaggctgctgggggccccttggcattcctggttattatggcccttttcatgctgaatgtaggcagcaccgccttcagcacctggtggttgagttactggatcaagcaaggaagcgggaacaccactgtgactcgagggaacgagacctcggtgagtgacagcatgaaggacaatcctcatatgcagtactatgccagcatctacgccctctccatggcagtcatgctgatcctgaaagccattcgaggagttgtctttgtcaagggcacgctgcgagcttcctcccggctgcatgacgagcttttccgaaggatccttcgaagccctatgaagttttttgacacgacccccacagggaggattctcaacaggttttccaaagacatggatgaagttgacgtgcggctgccgttccaggccgagatgttcatccagaacgttatcctggtgttcttctgtgtgggaatgatcgcaggagtcttcccgtggttccttgtggcagtggggccccttgtcatcctcttttcagtcctgcacattgtctccagggtcctgattcgggagctgaagcgtctggacaatatcacgcagtcacctttcctctcccacatcacgtccagcatacagggccttgccaccatccacgcctacaataaagggcaggagtttctgcacagataccaggagctgctggatgacaaccaagctcctttttttttgtttacgtgtgcgatgcggtggctggctgtgcggctggacctcatcagcatcgccctcatcaccaccacggggctgatgatcgttcttatgcacgggcagattcccccagcctatgcgggtctcgccatctcttatgctgtccagttaacggggctgttccagtttacggtcagactggcatctgagacagaagctcgattcacctcggtggagaggatcaatcactacattaagactctgtccttggaagcacctgccagaattaagaacaaggctccctcccctgactggccccaggagggagaggtgacctttgagaacgcagagatgaggtaccgagaaaacctccctctcgtcctaaagaaagtatccttcacgatcaaacctaaagagaagattggcattgtggggcggacaggatcagggaagtcctcgctggggatggccctcttccgtctggtggagttatctggaggctgcatcaagattgatggagtgagaatcagtgatattggccttgccgacctccgaagcaaactctctatcattcctcaagagccggtgctgttcagtggcactgtcagatcaaatttggaccccttcaaccagtacactgaagaccagatttgggatgccctggagaggacacacatgaaagaatgtattgctcagctacctctgaaacttgaatctgaagtgatggagaatggggataacttctcagtgggggaacggcagctcttgtgcatagctagagccctgctccgccactgtaagattctgattttagatgaagccacagctgccatggacacagagacagacttattgattcaagagaccatccgagaagcatttgcagactgtaccatgctgaccattgcccatcgcctgcacacggttctaggctccgataggattatggtgctggcccagggacaggtggtggagtttgacaccccatcggtccttctgtccaacgacagttcccgattctatgccatgtttgctgctgcagagaacaaggtcgctgtcaagggctgactcctccctgttgacgaagtctcttttctttagagcattgccattccctgcctggggcgggcccctcatcgcgtcctcctaccgaaaccttgcctttctcgattttatctttcgcacagcagttccggattggcttgtgtgtttcacttttagggagagtcatattttgattattgtatttattccatattcatgtaaacaaaatttagtttttgttcttaattgcactctaaaaggttcagggaaccgttattataattgtatcagaggcctataatgaagctttatacgtgtagctatatctatatataattctgtacatagcctatatttacagtgaaaatgtaagctgtttattttatattaaaataagcactgtgctaataacagtgcatattcctttctatcatttttgtacagtttgctgtactagagatctggttttgctattagactgtaggaagagtagcatttcattcttctctagctggtggtttcacggtgccaggttttctgggtgtccaaaggaagacgtgtggcaatagtgggccctccgacagccccctctgccgcctccccacggccgctccaggggtggctggagacgggtgggcggctggagaccatgcagagcgccgtgagttctcagggctcctgccttctgtcctggtgtcacttactgtttctgtcaggagagcagcggggcgaagcccaggccccttttcactccctccatcaagaatggggatcacagagacattcctccgagccggggagtttctttcctgccttcttctttttgctgttgtttctaaacaagaatcagtctatccacagagagtcccactgcctcaggttcctatggctggccactgcacagagctctccagctccaagacctgttggttccaagccctggagccaactgctgctttttgaggtggcactttttcatttgcctattcccacacctccacagttcagtggcagggctcaggatttcgtgggtctgttttcctttctcaccgcagtcgtcgcacagtctctctctctctctcccctcaaagtctgcaactttaagcagctcttgctaatcagtgtctcacactggcgtagaagtttttgtactgtaaagagacctacctcaggttgctggttgctgtgtggtttggtgtgttcccgcaaaccccctttgtgctgtggggctggtagctcaggtgggcgtggtcactgctgtcatcaattgaatggtcagcgttgcatgtcgtgaccaactagacattctgtcgccttagcatgtttgctgaacaccttgtggaagcaaaaatctgaaaatgtgaataaaattattttggattttgtaaaaaaaaaa

SEQ ID NO: 3 - protein, 208 aa, Homo sapiens
MKDIDIGKEYIIPSPGYRSVRERTSTSGTHRDREDSKFRRTRPLECQDALETAARAEGLSLDASMHSQLRILDEEHPKGKYHHGLSALKPIRTTSKHQHPVDNAGLFSCMTFSWLSSLARVAHKKGELSMEDVWSLSKHESSDVNCRRLERLWQEELNEVGPDAASLRRVVWIFCRTRLILSIVCLMITQLAGFSGPNFQDGCILRSE

SEQ ID NO: 4 - protein, 1437 aa, Homo sapiens
MKDIDIGKEYIIPSPGYRSVRERTSTSGTHRDREDSKFRRTRPLECQDALETAARAEGLSLDASMHSQLRILDEEHPKGKYHHGLSALKPIRTTSKHQHPVDNAGLFSCMTFSWLSSLARVAHKKGELSMEDVWSLSKHESSDVNCRRLERLWQEELNEVGPDAASLRRVVWIFCRTRLILSIVCLMITQLAGFSGPAFMVKHLLEYTQATESNLQYSLLLVLGLLLTEIVRSWSLALTWALNYRTGVRLRGAILTMAFKKILKLKNIKEKSLGELINICSNDGQRMFEAAAVGSLLAGGPVVAILGMIYNVIILGPTGFLGSAVFILFYPAMMFASRLTAYFRRKCVAATDERVQKMNEVLTYIKFIKMYAWVKAFSQSVQKIREEERRILEKAGYFQSITVGVAPIVVVIASVVTFSVHMTLGFDLTAAQAFTVVTVFNSMTFALKVTPFSVKSLSEASVAVDRFKSLFLMEEVHMIKNKPASPHIKIEMKNATLAWDSSHSSIQNSPKLTPKMKKDKRASRGKKEKVRQLQRTEHQAVLAEQKGHLLLDSDERPSPEEEEGKHIHLGHLRLQRTLHSIDLEIQEGKLVGICGSVGSGKTSLISAILGQMTLLEGSIAISGTFAYVAQQAWILNATLRDNILFGKEYDEERYNSVLNSCCLRPDLAILPSSDLTEIGERGANLSGGQRQRISLARALYSDRSIYILDDPLSALDAHVGNHIFNSAIRKHLKSKTVLFVTHQLQYLVDCDEVIFMKEGCITERGTHEELMNLNGDYATIFNNLLLGETPPVEINSKKETSGSQKKSQDKGPKTGSVKKEKAVKPEEGQLVQLEEKGQGSVPWSVYGVYIQAAGGPLAFLVIMALFMLNVGSTAFSTWWLSYWIKQGSGNTTVTRGNETSVSDSMKDNPHMQYYASIYALSMAVMLILKAIRGVVFVKGTLRASSRLHDELFRRILRSPMKFFDTTPTGRILNRFSKDMDEVDVRLPFQAEMFIQNVILVFFCVGMIAGVFPWFLVAVGPLVILFSVLHIVSRVLIRELKRLDNITQSPFLSHITSSIQGLATIHAYNKGQEFLHRYQELLDDNQAPFFLFTCAMRWLAVRLDLISIALITTTGLMIVLMHGQIPPAYAGLAISYAVQLTGLFQFTVRLASETEARFTSVERINHYIKTLSLEAPARIKNKAPSPDWPQEGEVTFENAEMRYRENLPLVLKKVSFTIKPKEKIGIVGRTGSGKSSLGMALFRLVELSGGCIKIDGVRISDIGLADLRSKLSIIPQEPVLFSGTVRSNLDPFNQYTEDQIWDALERTHMKECIAQLPLKLESEVMENGDNFSVGERQLLCIARALLRHCKILILDEATAAMDTETDLLIQETIREAFADCTMLTIAHRLHTVLGSDRIMVLAQGQVVEFDTPSVLLSNDSSRFYAMFAAAENKVAVKG

SEQ ID NO: 5 - DNA, 1394 bp, Homo sapiens
agaagtgtcagagtctttgtagctttgaaagtcacctaggttatttgggcatgctctcctgagtcctctgctagttaagctctctgaaaagaaggtggcagacccggtttgctgatcgccccagggatcaggaggctgatcccaaagttgtcagatggagagtaaatacaaggagatactcttgctaacaggcctggataacatcactgatgaggaactggataggtttaagttctttctttcagacgagtttaatattgccacaggcaaactacatactgcaaacagaatacaagtagctaccttgatgattcaaaatgctggggcggtgtctgcagtgatgaagaccattcgtatttttcagaagttgaattatatgcttttggcaaaacgtcttcaggaggagaaggagaaagttgataagcaatacaaatcggtaacaaaaccaaagccactaagtcaagctgaaatgagtcctgctgcatctgcagccatcagaaatgatgtcgcaaagcaacgtgctgcaccaaaagtctctcctcatgttaagcctgaacagaaacagatggtggcccagcaggaatctatcagagaagggtttcagaagcgctgtttgccagttatggtactgaaagcaaagaagcccttcacgtttgagacccaagaaggcaagcaggagatgtttcatgctacagtggctacagaaaaggaattcttctttgtaaaagtttttaatacactgctgaaagataaattcattccaaagagaataattataatagcaagatattatcggcacagtggtttcttagaggtaaatagcgcctcacgtgtgttagatgctgaatctgaccaaaaggttaatgtcccgctgaacattatcagaaaagctggtgaaaccccgaagatcaacacgcttcaaactcagccccttggaacaattgtgaatggtttgtttgtagtccagaaggtaacagaaaagaagaaaaacatattatttgacctaagtgacaacactgggaaaatggaagtactgggggttagaaacgaggacacaatgaaatgtaaggaaggagataaggttcgacttacattcttcacactgtcaaaaaatggagaaaaactacagctgacatctggagttcatagcaccataaaggttattaaggccaaaaaaaaaacatagagaagtaaaaaggaccaattcaagccaactggtctaagcagcatttaattgaagaatatgtgatacagcctcttcaatcagattgtaagttacctgaaagctgcagttcacaggctcctctctccaccaaattaggatagaataattgctggataaacaaattcagaatatcaacagatgatcacaataaacatctgtttctcattca

SEQ ID NO: 6 - protein, 343 aa, Homo sapiens
MESKYKEILLLTGLDNITDEELDRFKFFLSDEFNIATGKLHTANRIQVATLMIQNAGAVSAVMKTIRIFQKLNYMLLAKRLQEEKEKVDKQYKSVTKPKPLSQAEMSPAASAAIRNDVAKQRAAPKVSPHVKPEQKQMVAQQESIREGFQKRCLPVMVLKAKKPFTFETQEGKQEMFHATVATEKEFFFVKVFNTLLKDKFIPKRIIIIARYYRHSGFLEVNSASRVLDAESDQKVNVPLNIIRKAGETPKINTLQTQPLGTIVNGLFVVQKVTEKKKNILFDLSDNTGKMEVLGVRNEDTMKCKEGDKVRLTFFTLSKNGEKLQLTSGVHSTIKVIKAKKKT

SEQ ID NO: 7 - DNA, 1358 bp, Homo sapiens
gttggtgaagatcttaacaccacgccttgagcaagtcgcaagagcgggaggacacagaccaggaaccgagaagggacaagcacatggaagccagcccagcatccgggcccagacacttgatggatccacacatattcacttccaactttaacaatggcattggaaggcataagacctacctgtgctacgaagtggagcgcctggacaatggcacctcggtcaagatggaccagcacaggggctttctacacaaccaggctaagaatcttctctgtggcttttacggccgccatgcggagctgcgcttcttggacctggttccttctttgcagttggacccggcccagatctacagggtcacttggttcatctcctggagcccctgcttctcctggggctgtgccggggaagtgcgtgcgttccttcaggagaacacacacgtgagactgcgtatcttcgctgcccgcatctatgattacgaccccctatataaggaggcactgcaaatgctgcgggatgctggggcccaagtctccatcatgacctacgatgaatttaagcactgctgggacacctttgtggaccaccagggatgtcccttccagccctgggatggactagatgagcacagccaagccctgagtgggaggctgcgggccattctccagaatcagggaaactgaaggatgggcctcagtctctaaggaaggcagagacctgggttgagcagcagaataaaagatcttcttccaagaaatgcaaacagaccgttcaccaccatctccagctgctcacagacgccagcaaagcagtatgctcccgatcaagtagatttttaaaaaatcagagtgggccgggcgcggtggctcacgcctgtaatcccagcactttggaggccaaggcgggtggatcacgaggtcaggagatcgagaccatcctggctaacacggtgaaaccctgtctctactaaaaatacaaaaaattagccaggcgtggtggcgggcgcctgtagtcccagctactctggaggctgaggcaggagagtagcgtgaacccgggaggcagagcttgcggtgagccgagattgcgctactgcactccagcctgggcgacagtaccagactccatctcaaaaaaaaaaaaaccagactgaattaattttaactgaaaatttctcttatgttccaagtacacaatagtaagattatgctcaatattctcagaataattttcaatgtattaatgaaatgaaatgataatttggcttcatatctagactaacacaaaattaagaatcttccataattgcttttgctcagtaactgtgtcatgaattgcaagagtttccacaaacacta

SEQ ID NO: 8 - protein, 199 aa, Homo sapiens
MEASPASGPRHLMDPHIFTSNFNNGIGRHKTYLCYEVERLDNGTSVKMDQHRGFLHNQAKNLLCGFYGRHAELRFLDLVPSLQLDPAQIYRVTWFISWSPCFSWGCAGEVRAFLQENTHVRLRIFAARIYDYDPLYKEALQMLRDAGAQVSIMTYDEFKHCWDTFVDHQGCPFQPWDGLDEHSQALSGRLRAILQNQGN

SEQ ID NO: 9 - DNA, 1565 bp, Homo sapiens
agtctcacttcagttccttttgcatgaagagctcagaatcaaaagaggaaaccaacccctaagatgagctttccatgtaaatttgtagccagcttccttctgattttcaatgtttcttccaaaggtgcagtctccaaagagattacgaatgccttggaaacctggggtgccttgggtcaggacatcaacttggacattcctagttttcaaatgagtgatgatattgacgatataaaatgggaaaaaacttcagacaagaaaaagattgcacaattcagaaaagagaaagagactttcaaggaaaaagatacatataagctatttaaaaatggaactctgaaaattaagcatctgaagaccgatgatcaggatatctacaaggtatcaatatatgatacaaaaggaaaaaatgtgttggaaaaaatatttgatttgaagattcaagagagggtctcaaaaccaaagatctcctggacttgtatcaacacaaccctgacctgtgaggtaatgaatggaactgaccccgaattaaacctgtatcaagatgggaaacatctaaaactttctcagagggtcatcacacacaagtggaccaccagcctgagtgcaaaattcaagtgcacagcagggaacaaagtcagcaaggaatccagtgtcgagcctgtcagctgtccagagaaaggtctggacatctatctcatcattggcatatgtggaggaggcagcctcttgatggtctttgtggcactgctcgttttctatatcaccaaaaggaaaaaacagaggagtcggagaaatgatgaggagctggagacaagagcccacagagtagctactgaagaaaggggccggaagccccaccaaattccagcttcaacccctcagaatccagcaacttcccaacatcctcctccaccacctggtcatcgttcccaggcacctagtcatcgtcccccgcctcctggacaccgtgttcagcaccagcctcagaagaggcctcctgctccgtcgggcacacaagttcaccagcagaaaggcccgcccctccccagacctcgagttcagccaaaacctccccatggggcagcagaaaactcattgtccccttcctctaattaaaaaagatagaaactgtctttttcaataaaaagcactgtggatttctgccctcctgatgtgcatatccgtacttccatgaggtgttttctgtgtgcagaacattgtcacctcctgaggctgtgggccacagccacctctgcatcttcgaactcagccatgtggtcaacatctggagtttttggtctcctcagagagctccatcacaccagtaaggagaagcaatataagtgtgattgcaagaatggtagaggaccgagcacagaaatcttagagatttcttgtcccctctcaggtcatgtgtagatgcgataaatcaagtgattggtgtgcctgggtctcactacaagcagcctatctgcttaagagactctggagtttcttatgtgccctggtggacacttgcccaccatcctgtgagtaaaagtgaaataaaagctttgactaga

SEQ ID NO: 10 - protein, 351 aa, Homo sapiens
MSFPCKFVASFLLIFNVSSKGAVSKEITNALETWGALGQDINLDIPSFQMSDDIDDIKWEKTSDKKKIAQFRKEKETFKEKDTYKLFKNGTLKIKHLKTDDQDIYKVSIYDTKGKNVLEKIFDLKIQERVSKPKISWTCINTTLTCEVMNGTDPELNLYQDGKHLKLSQRVITHKWTTSLSAKFKCTAGNKVSKESSVEPVSCPEKGLDIYLIIGICGGGSLLMVFVALLVFYITKRKKQRSRRNDEELETRAHRVATEERGRKPHQIPASTPQNPATSQHPPPPPGHRSQAPSHRPPPPGHRVQHQPQKRPPAPSGTQVHQQKGPPLPRPRVQPKPPHGAAENSLSPSSN

SEQ ID NO: 11 - DNA, 1674 bp, Homo sapiens
gtcctccacttcctggggaggtagctgcagaataaaaccagcagagactccttttctcctaaccgtcccggccaccgctgcctcagcctctgcctcccagcctctttctgagggaaaggacaagatgaagtggaaggcgcttttcaccgcggccatcctgcaggcacagttgccgattacagaggcacagagctttggcctgctggatcccaaactctgctacctgctggatggaatcctcttcatctatggtgtcattctcactgccttgttcctgagagtgaagttcagcaggagcgcagacgcccccgcgtaccagcagggccagaaccagctctataacgagctcaatctaggacgaagagaggagtacgatgttttggacaagagacgtggccgggaccctgagatggggggaaagccgagaaggaagaaccctcaggaaggcctgtacaatgaactgcagaaagataagatggcggaggcctacagtgagattgggatgaaaggcgagcgccggaggggcaaggggcacgatggcctttaccagggtctcagtacagccaccaaggacacctacgacgcccttcacatgcaggccctgccccctcgctaacagccaggggatttcaccactcaaaggccagacctgcagacgcccagattatgagacacaggatgaagcatttacaacccggttcactcttctcagccactgaagtattcccctttatgtacaggatgctttggttatatttagctccaaaccttcacacacagactgttgtccctgcactctttaagggagtgtactcccagggcttacggccctggccttgggccctctggtttgccggtggtgcaggtagacctgtctcctggcggttcctcgttctccctgggaggcgggcgcactgcctctcacagctgagttgttgagtctgttttgtaaagtccccagagaaagcgcagatgctagcacatgccctaatgtctgtatcactctgtgtctgagtggcttcactcctgctgtaaatttggcttctgttgtcaccttcacctcctttcaaggtaactgtactgggccatgttgtgcctccctggtgagagggccgggcagaggggcagatggaaaggagcctaggccaggtgcaaccagggagctgcaggggcatgggaaggtgggcgggcaggggagggtcagccagggcctgcgagggcagcgggagcctccctgcctcaggcctctgtgccgcaccattgaactgtaccatgtgctacaggggccagaagatgaacagactgaccttgatgagctgtgcacaaagtggcataaaaaacatgtggttacacagtgtgaataaagtgctgcggagcaagaggaggccgttgattcacttcacgctttcagcgaatgacaaaatcatctttgtgaaggcctcgcaggaagacccaacacatgggacctataactgcccagcggacagtggcaggacaggaaaaacccgtcaatgtactaggatactgctgcgtcattacagggcacaggccatggatggaaaacgctctctgctctgctttttttctactgttttaatttatactggcatgctaaagccttcctattttgcataataaatgcttcagtgaaaaaaaaaaaaaaaaaaaaaaaaa

SEQ ID NO: 12 - DNA, 1690 bp, Homo sapiens
tgctttctcaaaggccccacagtcctccacttcctggggaggtagctgcagaataaaaccagcagagactccttttctcctaaccgtcccggccaccgctgcctcagcctctgcctcccagcctctttctgagggaaaggacaagatgaagtggaaggcgcttttcaccgcggccatcctgcaggcacagttgccgattacagaggcacagagctttggcctgctggatcccaaactctgctacctgctggatggaatcctcttcatctatggtgtcattctcactgccttgttcctgagagtgaagttcagcaggagcgcagacgcccccgcgtaccagcagggccagaaccagctctataacgagctcaatctaggacgaagagaggagtacgatgttttggacaagagacgtggccgggaccctgagatggggggaaagccgcagagaaggaagaaccctcaggaaggcctgtacaatgaactgcagaaagataagatggcggaggcctacagtgagattgggatgaaaggcgagcgccggaggggcaaggggcacgatggcctttaccagggtctcagtacagccaccaaggacacctacgacgcccttcacatgcaggccctgccccctcgctaacagccaggggatttcaccactcaaaggccagacctgcagacgcccagattatgagacacaggatgaagcatttacaacccggttcactcttctcagccactgaagtattcccctttatgtacaggatgctttggttatatttagctccaaaccttcacacacagactgttgtccctgcactctttaagggagtgtactcccagggcttacggccctggccttgggccctctggtttgccggtggtgcaggtagacctgtctcctggcggttcctcgttctccctgggaggcgggcgcactgcctctcacagctgagttgttgagtctgttttgtaaagtccccagagaaagcgcagatgctagcacatgccctaatgtctgtatcactctgtgtctgagtggcttcactcctgctgtaaatttggcttctgttgtcaccttcacctcctttcaaggtaactgtactgggccatgttgtgcctccctggtgagagggccgggcagaggggcagatggaaaggagcctaggccaggtgcaaccagggagctgcaggggcatgggaaggtgggcgggcaggggagggtcagccagggcctgcgagggcagcgggagcctccctgcctcaggcctctgtgccgcaccattgaactgtaccatgtgctacaggggccagaagatgaacagactgaccttgatgagctgtgcacaaagtggcataaaaaacatgtggttacacagtgtgaataaagtgctgcggagcaagaggaggccgttgattcacttcacgctttcagcgaatgacaaaatcatctttgtgaaggcctcgcaggaagacccaacacatgggacctataactgcccagcggacagtggcaggacaggaaaaacccgtcaatgtactaggatactgctgcgtcattacagggcacaggccatggatggaaaacgctctctgctctgctttttttctactgttttaatttatactggcatgctaaagccttcctattttgcataataaatgcttcagtgaaaatgcaaaaaaaaaa

SEQ ID NO: 13 - protein, 163 aa, Homo sapiens
MKWKALFTAAILQAQLPITEAQSFGLLDPKLCYLLDGILFIYGVILTALFLRVKFSRSADAPAYQQGQNQLYNELNLGRREEYDVLDKRRGRDPEMGGKPRRKNPQEGLYNELQKDKMAEAYSEIGMKGERRRGKGHDGLYQGLSTATKDTYDALHMQALPPR

SEQ ID NO: 14 - protein, 164 aa, Homo sapiens
MKWKALFTAAILQAQLPITEAQSFGLLDPKLCYLLDGILFIYGVILTALFLRVKFSRSADAPAYQQGQNQLYNELNLGRREEYDVLDKRRGRDPEMGGKPQRRKNPQEGLYNELQKDKMAEAYSEIGMKGERRRGKGHDGLYQGLSTATKDTYDALHMQALPPR

SEQ ID NO: 15 - DNA, 4721 bp, Homo sapiens
acacttcgggttcctcggggaggaggggctggaaccctagcccatcgtcaggacaaagatgctcaggctgctcttggctctcaacttattcccttcaattcaagtaacaggaaacaagattttggtgaagcagtcgcccatgcttgtagcgtacgacaatgcggtcaaccttagctgcaagtattcctacaatctcttctcaagggagttccgggcatcccttcacaaaggactggatagtgctgtggaagtctgtgttgtatatgggaattactcccagcagcttcaggtttactcaaaaacggggttcaactgtgatgggaaattgggcaatgaatcagtgacattctacctccagaatttgtatgttaaccaaacagatatttacttctgcaaaattgaagttatgtatcctcctccttacctagacaatgagaagagcaatggaaccattatccatgtgaaagggaaacacctttgtccaagtcccctatttcccggaccttctaagcccttttgggtgctggtggtggttggtggagtcctggcttgctatagcttgctagtaacagtggcctttattattttctgggtgaggagtaagaggagcaggctcctgcacagtgactacatgaacatgactccccgccgccccgggcccacccgcaagcattaccagccctatgccccaccacgcgacttcgcagcctatcgctcctgacacggacgcctatccagaagccagccggctggcagcccccatctgctcaatatcactgctctggataggaaatgaccgccatctccagccggccacctcaggcccctgttgggccaccaatgccaatttttctcgagtgactagaccaaatatcaagatcattttgagactctgaaatgaagtaaaagagatttcctgtgacaggccaagtcttacagtgccatggcccacattccaacttaccatgtacttagtgacttgactgagaagttagggtagaaaacaaaaagggagtggattctgggagcctcttccctttctcactcacctgcacatctcagtcaagcaaagtgtggtatccacagacattttagttgcagaagaaaggctaggaaatcattccttttggttaaatgggtgtttaatcttttggttagtgggttaaacggggtaagttagagtagggggagggataggaagacatatttaaaaaccattaaaacactgtctcccactcatgaaatgagccacgtagttcctatttaatgctgttttcctttagtttagaaatacatagacattgtcttttatgaattctgatcatatttagtcattttgaccaaatgagggatttggtcaaatgagggattccctcaaagcaatatcaggtaaaccaagttgctttcctcactccctgtcatgagacttcagtgttaatgttcacaatatactttcgaaagaataaaatagttctcctacatgaagaaagaatatgtcaggaaataaggtcactttatgtcaaaattatttgagtactatgggacctggcgcagtggctcatgcttgtaatcccagcactttgggaggccgaggtgggcagatcacttgagatcaggaccagcctggtcaagatggtgaaactccgtctgtactaaaaatacaaaatttagcttggcctggtggcaggcacctgtaatcccagctgcccaagaggctgaggcatgagaatcgcttgaacctggcaggcggaggttgcagtgagccgagatagtgccacagctctccagcctgggcgacagagtgagactccatctcaaacaacaacaacaacaacaacaacaacaacaaaccacaaaattatttgagtactgtgaaggattatttgtctaacagttcattccaatcagaccaggtaggagctttcctgtttcatatgtttcagggttgcacagttggtctctttaatgtcggtgtggagatccaaagtgggttgtggaaagagcgtccataggagaagtgagaatactgtgaaaaagggatgttagcattcattagagtatgaggatgagtcccaagaaggttctttggaaggaggacgaatagaatggagtaatgaaattcttgccatgtgctgaggagatagccagcattaggtgacaatcttccagaagtggtcaggcagaaggtgccctggtgagagctcctttacagggactttatgtggtttagggctcagagctccaaaactctgggctcagctgctcctgtaccttggaggtccattcacatgggaaagtattttggaatgtgtcttttgaagagagcatcagagttcttaagggactgggtaaggcctgaccctgaaatgaccatggatatttttctacctacagtttgagtcaactagaatatgcctggggaccttgaagaatggcccttcagtggccctcaccatttgttcatgcttcagttaattcaggtgttgaaggagcttaggttttagaggcacgtagacttggttcaagtctcgttagtagttgaatagcctcaggcaagtcactgcccacctaagatgatggttcttcaactataaaatggagataatggttacaaatgtctcttcctatagtataatctccataagggcatggcccaagtctgtctttgactctgcctatccctgacatttagtagcatgcccgacatacaatgttagctattggtattattgccatatagataaattatgtataaaaattaaactgggcaatagcctaagaaggggggaatattgtaacacaaatttaaacccactacgcagggatgaggtgctataatatgaggaccttttaacttccatcattttcctgtttcttgaaatagtttatcttgtaatgaaatataaggcacctcccacttttatgtatagaaagaggtcttttaatttttttttaatgtgagaaggaagggaggagtaggaatcttgagattccagatcgaaaatactgtactttggttgatttttaagtgggcttccattccatggatttaatcagtcccaagaagatcaaactcagcagtacttgggtgctgaagaactgttggatttaccctggcacgtgtgccacttgccagcttcttgggcacacagagttcttcaatccaagttatcagattgtatttgaaaatgacagagctggagagttttttgaaatggcagtggcaaataaataaatacttttttttaaatggaaagacttgatctatggtaataaatgattttgttttctgactggaaaaataggcctactaaagatgaatcacacttgagatgtttcttactcactctgcacagaaacaaagaagaaatgttatacagggaagtccgttttcactattagtatgaaccaagaaatggttcaaaaacagtggtaggagcaatgctttcatagtttcagatatggtagttatgaagaaaacaatgtcatttgctgctattattgtaagagtcttataattaatggtactcctataatttttgattgtgagctcacctatttgggttaagcatgccaatttaaagagaccaagtgtatgtacattatgttctacatattcagtgataaaattactaaactactatatgtctgctttaaatttgtactttaatattgtcttttggtattaagaaagatatgctttcagaatagatatgcttcgctttggcaaggaatttggatagaacttgctatttaaaagaggtgtggggtaaatccttgtataaatctccagtttagccttttttgaaaaagctagactttcaaatactaatttcacttcaagcagggtacgtttctggtttgtttgcttgacttcagtcacaatttcttatcagaccaatggctgacctctttgagatgtcaggctaggcttacctatgtgttctgtgtcatgtgaatgctgagaagtttgacagagatccaacttcagccttgaccccatcagtccctcgggttaactaactgagccaccggtcctcatggctattttaatgagggtattgatggttaaatgcatgtctgatcccttatcccagccatttgcactgccagctgggaactataccagacctggatactgatcccaaagtgttaaattcaactacatgctggagattagagatggtgccaataaaggacccagaaccaggatcttgattgctatagacttattaataatccaggtcaaagagagtgacacacactctctcaagacctggggtgagggagtctgtgttatctgcaaggccatttgaggctcagaaagtctctctttcctatagatatatgcatactttctgacatataggaatgtatcaggaatactcaaccatcacaggcatgttcctacctcagggcctttacatgtcctgtttactctgtctagaatgtccttctgtagatgacctggcttgcctcgtcacccttcaggtccttgctcaagtgtcatcttctcccctagttaaactaccccacaccctgtctgctttccttgcttatttttctccatagcattttaccatctcttacattagacatttttcttatttatttgtagtttataagcttcatgaggcaagtaactttgctttgtttcttgctgtatctccagtgcccagagcagtgcctggtatataataaatatttattgactgagtgaa

SEQ ID NO: 16 - DNA, 4543 bp, Homo sapiens
taaagtcatcaaaacaacgttatatcctgtgtgaaatgctgcagtcaggatgccttgtggtttgagtgccttgatcatgtgccctaaggggatggtggcggtggtggtggccgtggatgacggagactctcaggccttggcaggtgcgtctttcagttcccctcacacttcgggttcctcggggaggaggggctggaaccctagcccatcgtcaggacaaagatgctcaggctgctcttggctctcaacttattcccttcaattcaagtaacagggaaacacctttgtccaagtcccctatttcccggaccttctaagcccttttgggtgctggtggtggttggtggagtcctggcttgctatagcttgctagtaacagtggcctttattattttctgggtgaggagtaagaggagcaggctcctgcacagtgactacatgaacatgactccccgccgccccgggcccacccgcaagcattaccagccctatgccccaccacgcgacttcgcagcctatcgctcctgacacggacgcctatccagaagccagccggctggcagcccccatctgctcaatatcactgctctggataggaaatgaccgccatctccagccggccacctcaggcccctgttgggccaccaatgccaatttttctcgagtgactagaccaaatatcaagatcattttgagactctgaaatgaagtaaaagagatttcctgtgacaggccaagtcttacagtgccatggcccacattccaacttaccatgtacttagtgacttgactgagaagttagggtagaaaacaaaaagggagtggattctgggagcctcttccctttctcactcacctgcacatctcagtcaagcaaagtgtggtatccacagacattttagttgcagaagaaaggctaggaaatcattccttttggttaaatgggtgtttaatcttttggttagtgggttaaacggggtaagttagagtagggggagggataggaagacatatttaaaaaccattaaaacactgtctcccactcatgaaatgagccacgtagttcctatttaatgctgttttcctttagtttagaaatacatagacattgtcttttatgaattctgatcatatttagtcattttgaccaaatgagggatttggtcaaatgagggattccctcaaagcaatatcaggtaaaccaagttgctttcctcactccctgtcatgagacttcagtgttaatgttcacaatatactttcgaaagaataaaatagttctcctacatgaagaaagaatatgtcaggaaataaggtcactttatgtcaaaattatttgagtactatgggacctggcgcagtggctcatgcttgtaatcccagcactttgggaggccgaggtgggcagatcacttgagatcaggaccagcctggtcaagatggtgaaactccgtctgtactaaaaatacaaaatttagcttggcctggtggcaggcacctgtaatcccagctgcccaagaggctgaggcatgagaatcgcttgaacctggcaggcggaggttgcagtgagccgagatagtgccacagctctccagcctgggcgacagagtgagactccatctcaaacaacaacaacaacaacaacaacaacaacaaaccacaaaattatttgagtactgtgaaggattatttgtctaacagttcattccaatcagaccaggtaggagctttcctgtttcatatgtttcagggttgcacagttggtctctttaatgtcggtgtggagatccaaagtgggttgtggaaagagcgtccataggagaagtgagaatactgtgaaaaagggatgttagcattcattagagtatgaggatgagtcccaagaaggttctttggaaggaggacgaatagaatggagtaatgaaattcttgccatgtgctgaggagatagccagcattaggtgacaatcttccagaagtggtcaggcagaaggtgccctggtgagagctcctttacagggactttatgtggtttagggctcagagctccaaaactctgggctcagctgctcctgtaccttggaggtccattcacatgggaaagtattttggaatgtgtcttttgaagagagcatcagagttcttaagggactgggtaaggcctgaccctgaaatgaccatggatatttttctacctacagtttgagtcaactagaatatgcctggggaccttgaagaatggcccttcagtggccctcaccatttgttcatgcttcagttaattcaggtgttgaaggagcttaggttttagaggcacgtagacttggttcaagtctcgttagtagttgaatagcctcaggcaagtcactgcccacctaagatgatggttcttcaactataaaatggagataatggttacaaatgtctcttcctatagtataatctccataagggcatggcccaagtctgtctttgactctgcctatccctgacatttagtagcatgcccgacatacaatgttagctattggtattattgccatatagataaattatgtataaaaattaaactgggcaatagcctaagaaggggggaatattgtaacacaaatttaaacccactacgcagggatgaggtgctataatatgaggaccttttaacttccatcattttcctgtttcttgaaatagtttatcttgtaatgaaatataaggcacctcccacttttatgtatagaaagaggtcttttaatttttttttaatgtgagaaggaagggaggagtaggaatcttgagattccagatcgaaaatactgtactttggttgatttttaagtgggcttccattccatggatttaatcagtcccaagaagatcaaactcagcagtacttgggtgctgaagaactgttggatttaccctggcacgtgtgccacttgccagcttcttgggcacacagagttcttcaatccaagttatcagattgtatttgaaaatgacagagctggagagttttttgaaatggcagtggcaaataaataaatacttttttttaaatggaaagacttgatctatggtaataaatgattttgttttctgactggaaaaataggcctactaaagatgaatcacacttgagatgtttcttactcactctgcacagaaacaaagaagaaatgttatacagggaagtccgttttcactattagtatgaaccaagaaatggttcaaaaacagtggtaggagcaatgctttcatagtttcagatatggtagttatgaagaaaacaatgtcatttgctgctattattgtaagagtcttataattaatggtactcctataatttttgattgtgagctcacctatttgggttaagcatgccaatttaaagagaccaagtgtatgtacattatgttctacatattcagtgataaaattactaaactactatatgtctgctttaaatttgtactttaatattgtcttttggtattaagaaagatatgctttcagaatagatatgcttcgctttggcaaggaatttggatagaacttgctatttaaaagaggtgtggggtaaatccttgtataaatctccagtttagccttttttgaaaaagctagactttcaaatactaatttcacttcaagcagggtacgtttctggtttgtttgcttgacttcagtcacaatttcttatcagaccaatggctgacctctttgagatgtcaggctaggcttacctatgtgttctgtgtcatgtgaatgctgagaagtttgacagagatccaacttcagccttgaccccatcagtccctcgggttaactaactgagccaccggtcctcatggctattttaatgagggtattgatggttaaatgcatgtctgatcccttatcccagccatttgcactgccagctgggaactataccagacctggatactgatcccaaagtgttaaattcaactacatgctggagattagagatggtgccaataaaggacccagaaccaggatcttgattgctatagacttattaataatccaggtcaaagagagtgacacacactctctcaagacctggggtgagggagtctgtgttatctgcaaggccatttgaggctcagaaagtctctctttcctatagatatatgcatactttctgacatataggaatgtatcaggaatactcaaccatcacaggcatgttcctacctcagggcctttacatgtcctgtttactctgtctagaatgtccttctgtagatgacctggcttgcctcgtcacccttcaggtccttgctcaagtgtcatcttctcccctagttaaactaccccacaccctgtctgctttccttgcttatttttctccatagcattttaccatctcttacattagacatttttcttatttatttgtagtttataagcttcatgaggcaagtaactttgctttgtttcttgctgtatctccagtgcccagagcagtgcctggtatataataaatatttattgactgagtgaaaaaaaaaaaaaaaaa

SEQ ID NO: 17 - protein, 220 aa, Homo sapiens
MLRLLLALNLFPSIQVTGNKILVKQSPMLVAYDNAVNLSCKYSYNLFSREFRASLHKGLDSAVEVCVVYGNYSQQLQVYSKTGFNCDGKLGNESVTFYLQNLYVNQTDIYFCKIEVMYPPPYLDNEKSNGTIIHVKGKHLCPSPLFPGPSKPFWVLVVVGGVLACYSLLVTVAFIIFWVRSKRSRLLHSDYMNMTPRRPGPTRKHYQPYAPPRDFAAYRS

SEQ ID NO: 18 - protein, 101 aa, Homo sapiens
MLRLLLALNLFPSIQVTGKHLCPSPLFPGPSKPFWVLVVVGGVLACYSLLVTVAFIIFWVRSKRSRLLHSDYMNMTPRRPGPTRKHYQPYAPPRDFAAYRS

SEQ ID NO: 19 - DNA, 1534 bp, Homo sapiens
tattgtcagagtcctcttgtttggccttctaggaaggctgtgggacccagctttcttcaaccagtccaggtggaggcctctgccttgaacgtttccaagtgaggtaaaacccgcaggcccagaggcctctctacttcctgtgtggggttcagaaaccctcctcccctcccagcctcaggtgcctgcttcagaaaatgaagtagtaagtctgctggcctccgccatcttagtaaagtaacagtcccatgaaacaaagatgcagtcgggcactcactggagagttctgggcctctgcctcttatcagttggcgtttgggggcaagatggtaatgaagaaatgggtggtattacacagacaccatataaagtctccatctctggaaccacagtaatattgacatgccctcagtatcctggatctgaaatactatggcaacacaatgataaaaacataggcggtgatgaggatgataaaaacataggcagtgatgaggatcacctgtcactgaaggaattttcagaattggagcaaagtggttattatgtctgctaccccagaggaagcaaaccagaagatgcgaacttttatctctacctgagggcaagagtgtgtgagaactgcatggagatggatgtgatgtcggtggccacaattgtcatagtggacatctgcatcactgggggcttgctgctgctggtttactactggagcaagaatagaaaggccaaggccaagcctgtgacacgaggagcgggtgctggcggcaggcaaaggggacaaaacaaggagaggccaccacctgttcccaacccagactatgagcccatccggaaaggccagcgggacctgtattctggcctgaatcagagacgcatctgaccctctggagaacactgcctcccgctggcccaggtctcctctccagtccccctgcgactccctgtttcctgggctagtcttggaccccacgagagagaatcgttcctcagcctcatggtgaactcgcgccctccagcctgatcccccgctccctcctccctgccttctctgctggtacccagtcctaaaatattgctgcttcctcttcctttgaagcatcatcagtagtcacaccctcacagctggcctgccctcttgccaggatatttatttgtgctattcactcccttccctttggatgtaacttctccgttcagttccctccttttcttgcatgtaagttgtcccccatcccaaagtattccatctacttttctatcgccgtccccttttgcagccctctctggggatggactgggtaaatgttgacagaggccctgccccgttcacagatcctggccctgagccagccctgtgctcctccctcccccaacactccctaccaaccccctaatcccctactccctccaccccccctccactgtaggccactggatggtcatttgcatctccgtaaatgtgctctgctcctcagctgagagagaaaaaaataaactgtatttggctgcaagaaaaaaaaaaaaaaaaaaaaaa

SEQ ID NO: 20 - protein, 207 aa, Homo sapiens
MQSGTHWRVLGLCLLSVGVWGQDGNEEMGGITQTPYKVSISGTTVILTCPQYPGSEILWQHNDKNIGGDEDDKNIGSDEDHLSLKEFSELEQSGYYVCYPRGSKPEDANFYLYLRARVCENCMEMDVMSVATIVIVDICITGGLLLLVYYWSKNRKAKAKPVTRGAGAGGRQRGQNKERPPPVPNPDYEPIRKGQRDLYSGLNQRRI

SEQ ID NO: 21 - DNA, 2690 bp, Homo sapiens
agtctagctgctgcacaggctggctggctggctggctgctaagggctgctccacgcttttgccggaggacagagactgacatggaacaggggaagggcctggctgtcctcatcctggctatcattcttcttcaaggtactttggcccagtcaatcaaaggaaaccacttggttaaggtgtatgactatcaagaagatggttcggtacttctgacttgtgatgcagaagccaaaaatatcacatggtttaaagatgggaagatgatcggcttcctaactgaagataaaaaaaaatggaatctgggaagtaatgccaaggaccctcgagggatgtatcagtgtaaaggatcacagaacaagtcaaaaccactccaagtgtattacagaatgtgtcagaactgcattgaactaaatgcagccaccatatctggctttctctttgctgaaatcgtcagcattttcgtccttgctgttggggtctacttcattgctggacaggatggagttcgccagtcgagagcttcagacaagcagactctgttgcccaatgaccagctctaccagcccctcaaggatcgagaagatgaccagtacagccaccttcaaggaaaccagttgaggaggaattgaactcaggactcagagtagtccaggtgttctcctcctattcagttcccagaatcaaagcaatgcattttggaaagctcctagcagagagactttcagccctaaatctagactcaaggttcccagagatgacaaatggagaagaaaggccatcagagcaaatttgggggtttctcaaataaaataaaaataaaaacaaatactgtgtttcagaagcgccacctattggggaaaattgtaaaagaaaaatgaaaagatcaaataaccccctggatttgaatataattttttgtgttgtaatttttatttcgtttttgtataggttataattcacatggctcaaatattcagtgaaagctctccctccaccgccatcccctgctacccagtgaccctgttgccctcttcagagacaaattagtttctcttttttttttttttttttttttttttgagacagtctggctctgtcacccaggctgaaatgcagtggcaccatctcggctcactgcaacctctgcctcctgggttcaagcgattctcctgcctcagcctcccgggcagctgggattacaggcacacactaccacacctggctaatttttgtatttttagtagagacagggttttgctctgttggccaagctggtctcgaactcctgacctcaagtgatccgcccgcctcagcctcccaaagtgctgggattacaggtgtgagccaccatgcctggtcttaaaaccagtttcttatatatctctctggaggtattctaggcatatatgagcacattctcaagtacatattatcctcccttcccctatcttttagacaaatgatatcaaactatacatcttgtgagattattgcataccattatatgaagataccattatatcctttttaatgcaaccatattgtacaaatagactatgatttatttaacctgttatctatcagtggatatttaagttggtagttggttccaatcttttgctcttacaacaattctgcaatgactaacattgtataaatatcatttttaaaaataattgcattgaagcataatgtacatgccataaaatccacccatcttaagtgatttcacctgttctcagaaatttttagtaaatttaactaattgtacagccattaccataatccagctttaggacattttcttttttttcttttcttttcttttttttcttttttttttttttttgaagtggaatcttgctctgtggcccaggctggagtgcagtggcgcgatctcagctcactgcaacctccacctcctgggttcaagcgattctcttgccttggcctcccgagtagctgagactacaggcacatgccaccacgcccagctcattttttgtgtatttagtatttgtgtatctagtatttgtgtacttagtagagacagggtttcaccatgttggccaggctggtctccaattcctgacctcaggcgatccacccgccttgacctcccaaagtgctgggattacaggtgtgagccaccgcgccaggcccgtaactgtattttaatatagccattctatggatttaatatggtattttattatggccttaatttgcatttccctagatactaaccatgctgagtgtcctgtcttgtgtttattaaccattcatatatttttagtgaaatgtgtatcaaatcttttgcccatttttaagttgacttatttgtttgtcttcttactattgggttgcatatgtttttgatataagtcctttatcagatatatgatttggaaatattttctaccaatctgtggtttgtttttcttaatggtgtcttttgaagtgcaaaaggtttgaattttgaagtacattttattgattttttcttctatatattgtgcttttggtatcatgtctaataaatctttaccaaacccacagttacaaagattttctcctgtcttctttttatactttttacagctttatggttttagctctaacaataaatgtgattttgaacatacataagactatttgtaacaaacacaaataaattgaattgttgggca

SEQ ID NO: 22 - protein, 182 aa, Homo sapiens
MEQGKGLAVLILAIILLQGTLAQSIKGNHLVKVYDYQEDGSVLLTCDAEAKNITWFKDGKMIGFLTEDKKKWNLGSNAKDPRGMYQCKGSQNKSKPLQVYYRMCQNCIELNAATISGFLFAEIVSIFVLAVGVYFIAGQDGVRQSRASDKQTLLPNDQLYQPLKDREDDQYSHLQGNQLRRN

SEQ ID NO: 23 - DNA, 3049 bp, Homo sapiens
ctctcttcatttaagcacgactctgcagaaggaacaaagcaccctccccactgggctcctggttgcagagctccaagtcctcacacagatacgcctgtttgagaagcagcgggcaagaaagacgcaagcccagaggccctgccatttctgtgggctcaggtccctactggctcaggcccctgcctccctcggcaaggccacaatgaaccggggagtcccttttaggcacttgcttctggtgctgcaactggcgctcctcccagcagccactcagggaaagaaagtggtgctgggcaaaaaaggggatacagtggaactgacctgtacagcttcccagaagaagagcatacaattccactggaaaaactccaaccagataaagattctgggaaatcagggctccttcttaactaaaggtccatccaagctgaatgatcgcgctgactcaagaagaagcctttgggaccaaggaaactttcccctgatcatcaagaatcttaagatagaagactcagatacttacatctgtgaagtggaggaccagaaggaggaggtgcaattgctagtgttcggattgactgccaactctgacacccacctgcttcaggggcagagcctgaccctgaccttggagagcccccctggtagtagcccctcagtgcaatgtaggagtccaaggggtaaaaacatacagggggggaagaccctctccgtgtctcagctggagctccaggatagtggcacctggacatgcactgtcttgcagaaccagaagaaggtggagttcaaaatagacatcgtggtgctagctttccagaaggcctccagcatagtctataagaaagagggggaacaggtggagttctccttcccactcgcctttacagttgaaaagctgacgggcagtggcgagctgtggtggcaggcggagagggcttcctcctccaagtcttggatcacctttgacctgaagaacaaggaagtgtctgtaaaacgggttacccaggaccctaagctccagatgggcaagaagctcccgctccacctcaccctgccccaggccttgcctcagtatgctggctctggaaacctcaccctggcccttgaagcgaaaacaggaaagttgcatcaggaagtgaacctggtggtgatgagagccactcagctccagaaaaatttgacctgtgaggtgtggggacccacctcccctaagctgatgctgagtttgaaactggagaacaaggaggcaaaggtctcgaagcgggagaaggcggtgtgggtgctgaaccctgaggcggggatgtggcagtgtctgctgagtgactcgggacaggtcctgctggaatccaacatcaaggttctgcccacatggtccaccccggtgcagccaatggccctgattgtgctggggggcgtcgccggcctcctgcttttcattgggctaggcatcttcttctgtgtcaggtgccggcaccgaaggcgccaagcagagcggatgtctcagatcaagagactcctcagtgagaagaagacctgccagtgtcctcaccggtttcagaagacatgtagccccatttgaggcacgaggccaggcagatcccacttgcagcctccccaggtgtctgccccgcgtttcctgcctgcggaccagatgaatgtagcagatccccagcctctggcctcctgttcgcctcctctacaatttgccattgtttctcctgggttaggccccggcttcactggttgagtgttgctctctagtttccagaggcttaatcacaccgtcctccacgccatttccttttccttcaagcctagcccttctctcattatttctctctgaccctctccccactgctcatttggatcccaggggagtgttcagggccagccctggctggcatggagggtgaggctgggtgtctggaagcatggagcatgggactgttcttttacaagacaggaccctgggaccacagagggcaggaacttgcacaaaatcacacagccaagccagtcaaggatggatgcagatccagaggtttctggcagccagtacctcctgccccatgctgcccgcttctcaccctatgtgggtgggaccacagactcacatcctgaccttgcacaaacagcccctctggacacagccccatgtacacggcctcaagggatgtctcacatcctctgtctatttgagacttagaaaaatcctacaaggctggcagtgacagaactaagatgatcatctccagtttatagaccagaaccagagctcagagaggctagatgattgattaccaagtgccggactagcaagtgctggagtcgggactaacccaggtcccttgtcccaagttccactgctgcctcttgaatgcagggacaaatgccacacggctctcaccagtggctagtggtgggtactcaatgtgtacttttgggttcacagaagcacagcacccatgggaagggtccatctcagagaatttacgagcagggatgaaggcctccctgtctaaaatccctccttcatcccccgctggtggcagaatctgttaccagaggacaaagcctttggctcttctaatcagagcgcaagctgggagcacaggcactgcaggagagaatgcccagtgaccagtcactgaccctgtgcagaacctcctggaagcgagctttgctgggagagggggtagctagcctgagagggaaccctctaagggacctcaaaggtgattgtgccaggctctgcgcctgccccacaccctcccttaccctcctccagaccattcaggacacagggaaatcagggttacaaatcttcttgatccacttctctcaggatcccctctcttcctacccttcctcaccacttccctcagtcccaactccttttccctatttccttctcctcctgtctttaaagcctgcctcttccaggaagacccccctattgctgctggggctccccatttgcttactttgcatttgtgcccactctccacccctgctcccctgagctgaaataaaaatacaataaacttac

SEQ ID NO: 24 - protein, 458 aa, Homo sapiens
MNRGVPFRHLLLVLQLALLPAATQGKKVVLGKKGDTVELTCTASQKKSIQFHWKNSNQIKILGNQGSFLTKGPSKLNDRADSRRSLWDQGNFPLIIKNLKIEDSDTYICEVEDQKEEVQLLVFGLTANSDTHLLQGQSLTLTLESPPGSSPSVQCRSPRGKNIQGGKTLSVSQLELQDSGTWTCTVLQNQKKVEFKIDIVVLAFQKASSIVYKKEGEQVEFSFPLAFTVEKLTGSGELWWQAERASSSKSWITFDLKNKEVSVKRVTQDPKLQMGKKLPLHLTLPQALPQYAGSGNLTLALEAKTGKLHQEVNLVVMRATQLQKNLTCEVWGPTSPKLMLSLKLENKEAKVSKREKAVWVLNPEAGMWQCLLSDSGQVLLESNIKVLPTWSTPVQPMALIVLGGVAGLLLFIGLGIFFCVRCRHRRRQAERMSQIKRLLSEKKTCQCPHRFQKTCSPI

SEQ ID NO: 25 - DNA, 3968 bp, Homo sapiens
ggcggaagcgggagcctctgtcggccgcggaagcctggagtgggcggtacgcagacgcgcgcggtgagacccgctgtctgctcagcggactctgcccgcccccacctccccctgcgtcgggccgacatgaaggactcgctggtgctgctgggccgtgtcccggcgcacccggactcccgctgctggttcctggcctggaaccccgcggggaccctgctggcctcgtgcggcggcgaccggagaatccgcatctggggcacggagggtgacagctggatctgcaagtctgtcctttctgaaggccaccagcgcaccgtgcggaaggtagcctggtccccctgcggtaattacctggcctctgccagctttgatgctaccacttgcatttggaagaagaaccaggatgactttgagtgtgtaaccactctcgagggccatgaaaatgaggtcaagtcagtggcttgggccccatctggcaacctcctggccacttgcagccgagataagagcgtttgggtctgggaagttgatgaagaggatgagtatgaatgtgtcagtgttctcaactcccacacacaggatgtcaagcatgtggtttggcacccaagtcaggagctcttagcttctgccagctatgatgacacagtgaagctgtaccgggaggaagaggatgactgggtatgctgtgccacccttgagggccatgaatccactgtgtggagcttggcctttgacccgagtggccagcgcctggcgtcttgtagtgatgaccgtactgtgcgtatctggcgtcagtatctaccaggcaatgaacaaggggtggcatgcagcggctctgaccccagttggaaatgtatctgtactttgtccggcttccactcaaggaccatttatgacattgcttggtgtcagctgacaggggctctggccacagcttgtggggatgacgcgatccgcgtgtttcaggaggatcccaactcggatccacagcagcccaccttctccctgacagcccacttgcatcaggcccattcccaggatgtcaactgtgtggcctggaaccccaaggagccagggctactggcctcctgcagtgatgatggggaggtggccttctggaagtatcagcggcctgaaggcctctgagctacctcgactttggacagagtaatgactccccagaaaacgtcatataagactttaccagcccctgagaggaccaggaggagcatccttgaccttcatttaacttggctcacttctcttcagacttgggtagaagtgcagagccacagaattgctttccttccccgcctttgacatgaggccttcagtaaagagctacagaacatgagtacattgttataccacagatttttcttgcattagggcacagtgttaaattttttggaggtaaatatactatttataatcactatatatagtaggagggggtatgtgtctcaggcttttctgaagttgcaagacttaaagaaataatccatctgcatcccaagtcctattttataaggatattcataaaaattccatggtgaatccttgtctgaaataggtcctcccttcccagtttctgtgtaagtctttgcatttaagacatccaatcaataatgaaggaaatttttttctgaatgtaggtttgagtgaggggcacctctgctttcccttagcaaccctcatatacctccctgcaccgttacgctgtgatggcaactggggatagaaaaaaaatggggaaagacaggaatcctaaaagggagagttattactggccacaagccctgtattctcaacagggatgcaaattggttcttcagtaaggataaaaaaaaatcacaagcagttgtttgtggccctcctaaggcccacagcacatatagtgtgtctgtgatattccattttcatggcagggagtgatcaggaagaaggcttcctaggggactggcgatttaaaccagttgagaaacactgccatcagcaggcagtttcagactcactcaagttgtctcttgacagtcacttctaaatgggttctaatgtgacaatggcctccaaaactacagccttccctgaagtttaagctgtgaccttagattttagaaggacagtggggctgtacctagaatagtggttctcgaagaatgcggcctgcagatcctgggagtcccaagaccctttcagggaggatctgtgaggtcaactgttggcactgtggcatgaatcaaggtggtggcagcaaacttctagtagttttgatatgtccttgatagaacaaatagcaatggttaactattaaatgttgacctagccagcgcagtggctcatgcctgtaatcccagcactttgggaggctgaggcgggcggatcacctgaggtcgggagttcgaggccagcctgaccaacatggagaaaccccgtctcttctaaaaatacaaaattagctgggcatggtggtgcatgcctgtaattccagctactcgggaggctgaggcaagagaatcgcttgaatccggtaggtggaggttgcagtgagccgagatcataccattgcactccagcccaggcaacaagagtgaaaccctgtctcaaaaagaaaaaaaaagttgaccttgagaatttataatattctgagaaaactggaagcatgcataaagcccctctgctgtgcactgaagtatgggtgccttgaggaaaagcagttacacagttgagttgcaagctgaattggctgtgttcaaggcatgccctttagaattgaaagaactagcagattacggtatttagacttgaatatttggctgatattttctggaaattaatggaatgagcctctcacctcaagggaaacaactgatagtgttgccagtgataaagctttcaagcaaaaattggaatttccgaaaatctgtactccaccatgagctttattgttggggatattaacaaatgtgatttgtataatgaaatgcatttcatttggaagaattcaatgaaccatttttccaagtgaccagtacgtgatgttacaaaatcatgcatggctcaaagattgattcaaaagtgtaagacaggccagtggattttaatgtattaacaatataagagtgcattaagttttcggagtctacattgcctttaagaaactatgacttgtagtaagccgggcgcggtggctcacgcctgtaatcccaacactttgggaggccaaggtgggtggatcacaaggtcaggagttcaagaccagcctggccaatatggtgaaagtccgtctctactaaaattacaaaaattagccgggcgtggtggcagatcccttgtagtcccagctactcgggaggctgaggcaggagaatagcttgaacccgggaggtggaggttgcagtgagtcgagatcgtgccactggactccagcctgggtgacagagcgagactccatttcaaaaaaaaaaaaaaaaaaaaaaaatcacttgtagtcttggtgtggtatcaaagaatagccacaattagctgaaaaggctattttaaaaacttttccaactgcgtatctgtgtgaagtcaacttacttcaacaaaaaagtttggatgtagaagcagctgtaagaattcaactgtttattataacaagatactaaagagactgtaaaatgccacccttctccttggattgttttggaagttattcttcataaaaaatgttaacgtgggctgggcatggtggctcatgcctgtaatcccagcactctgggaggctgaggtgggcggatcacttgagctcaggaattcaaggtcagcctgggcaacatggctaaactctgtctctattaagaaaaaaaatgttaacattatgatttaaaagtgcattaaccttaatctagataataaaagctttttggggcaacctccagaactgtgaaaaataaatttgttatttaaaaagaaaaaaaaaaaaa

SEQ ID NO: 26 - protein, 339 aa, Homo sapiens
MKDSLVLLGRVPAHPDSRCWFLAWNPAGTLLASCGGDRRIRIWGTEGDSWICKSVLSEGHQRTVRKVAWSPCGNYLASASFDATTCIWKKNQDDFECVTTLEGHENEVKSVAWAPSGNLLATCSRDKSVWVWEVDEEDEYECVSVLNSHTQDVKHVVWHPSQELLASASYDDTVKLYREEEDDWVCCATLEGHESTVWSLAFDPSGQRLASCSDDRTVRIWRQYLPGNEQGVACSGSDPSWKCICTLSGFHSRTIYDIAWCQLTGALATACGDDAIRVFQEDPNSDPQQPTFSLTAHLHQAHSQDVNCVAWNPKEPGLLASCSDDGEVAFWKYQRPEGL

SEQ ID NO: 27 - DNA, 2755 bp, Homo sapiens
ccgggccgcgcttcctctcgccaggcctgcgagcttcctcccagcggagccctgggcgagccgaggttggccgccgccgccgccgagcccgctgccgccctcccgctcctgccccacccgcgccttgcccgggggcttctgccggggtggggtccgagccgggcgaccgcccggctgcgccgccgtcggggccgtaacccggcccgccgtccctcccgccccagccagcctctggccgccggagcccgcggggcgtggagcgcgaggagccccgcggccccgatcgagcgtccggggcggcccccggcagccagcgcgacgttccaaaatcgaacctcagtggcggcgctcggaagcggaactctgccggggccgcgccggctacattgtttcctccccccgactccctcccgcccccttcccccgcctttcttccctccgcgacccgggccgtgcgtccgtccccctgcctctgcctggcggtccctcctcccctctccttgcacccatacctctttgtaccgcaccccctggggacccctgcgcccctcccctcccccctgaccgcatggaccgtcccgcaggccgctgatgccgcccgcggcgaggtggcccggaccgcagtgccccaagagagctctaatggtaccaagtgacaggttggctttactgtgactcggggacgccagagctcctgagaagatgtcagcaatacaggccgcctggccatccggtacagaatgtattgccaagtacaacttccacggcactgccgagcaggacctgcccttctgcaaaggagacgtgctcaccattgtggccgtcaccaaggaccccaactggtacaaagccaaaaacaaggtgggccgtgagggcatcatcccagccaactacgtccagaagcgggagggcgtgaaggcgggtaccaaactcagcctcatgccttggttccacggcaagatcacacgggagcaggctgagcggcttctgtacccgccggagacaggcctgttcctggtgcgggagagcaccaactaccccggagactacacgctgtgcgtgagctgcgacggcaaggtggagcactaccgcatcatgtaccatgccagcaagctcagcatcgacgaggaggtgtactttgagaacctcatgcagctggtggagcactacacctcagacgcagatggactctgtacgcgcctcattaaaccaaaggtcatggagggcacagtggcggcccaggatgagttctaccgcagcggctgggccctgaacatgaaggagctgaagctgctgcagaccatcgggaagggggagttcggagacgtgatgctgggcgattaccgagggaacaaagtcgccgtcaagtgcattaagaacgacgccactgcccaggccttcctggctgaagcctcagtcatgacgcaactgcggcatagcaacctggtgcagctcctgggcgtgatcgtggaggagaagggcgggctctacatcgtcactgagtacatggccaaggggagccttgtggactacctgcggtctaggggtcggtcagtgctgggcggagactgtctcctcaagttctcgctagatgtctgcgaggccatggaatacctggagggcaacaatttcgtgcatcgagacctggctgcccgcaatgtgctggtgtctgaggacaacgtggccaaggtcagcgactttggtctcaccaaggaggcgtccagcacccaggacacgggcaagctgccagtcaagtggacagcccctgaggccctgagagagaagaaattctccactaagtctgacgtgtggagtttcggaatccttctctgggaaatctactcctttgggcgagtgccttatccaagaattcccctgaaggacgtcgtccctcgggtggagaagggctacaagatggatgcccccgacggctgcccgcccgcagtctatgaagtcatgaagaactgctggcacctggacgccgccatgcggccctccttcctacagctccgagagcagcttgagcacatcaaaacccacgagctgcacctgtgacggctggcctccgcctgggtcatgggcctgtggggactgaacctggaagatcatggacctggtgcccctgctcactgggcccgagcctgaactgagccccagcgggctggcgggcctttttcctgcgtcccagcctgcacccctccggccccgtctctcttggacccacctgtggggcctggggagcccactgaggggccagggaggaaggaggccacggagcgggaggcagcgccccaccacgtcgggcttccctggcctcccgccactcgccttcttagagttttattcctttccttttttgagattttttttccgtgtgtttattttttattatttttcaagataaggagaaagaaagtacccagcaaatgggcattttacaagaagtacgaatcttatttttcctgtcctgcccgtgagggtgggggggaccgggcccctctctagggacccctcgccccagcctcattccccattctgtgtcccatgtcccgtgtctcctcggtcgccccgtgtttgcgcttgaccatgttgcactgtttgcatgcgcccgaggcagacgtctgtcaggggcttggatttcgtgtgccgctgccacccgcccacccgccttgtgagatggaattgtaataaaccacgccatgaggacaccgccgcccgcctcggcgcttcctccaccgagaaaaaaaaaaaaaaa

SEQ ID NO: 28 - protein, 450 aa, Homo sapiens
MSAIQAAWPSGTECIAKYNFHGTAEQDLPFCKGDVLTIVAVTKDPNWYKAKNKVGREGIIPANYVQKREGVKAGTKLSLMPWFHGKITREQAERLLYPPETGLFLVRESTNYPGDYTLCVSCDGKVEHYRIMYHASKLSIDEEVYFENLMQLVEHYTSDADGLCTRLIKPKVMEGTVAAQDEFYRSGWALNMKELKLLQTIGKGEFGDVMLGDYRGNKVAVKCIKNDATAQAFLAEASVMTQLRHSNLVQLLGVIVEEKGGLYIVTEYMAKGSLVDYLRSRGRSVLGGDCLLKFSLDVCEAMEYLEGNNFVHRDLAARNVLVSEDNVAKVSDFGLTKEASSTQDTGKLPVKWTAPEALREKKFSTKSDVWSFGILLWEIYSFGRVPYPRIPLKDVVPRVEKGYKMDAPDGCPPAVYEVMKNCWHLDAAMRPSFLQLREQLEHIKTHELHL

SEQ ID NO: 29 - DNA, 6855 bp, Homo sapiens
ggccggagggcgcccgaggggccccgggccgcggcgctcagggcccgggcggccggcggcggccccggggctggggggagtccagcccggatattgagtgcagccattgagaaaagccaaactcttgtgtgtgcgcgtctcgatagcccccaagatggccgccaatgtgggatcgatgtttcaatattggaagcgatttgatctacggcgactccagaaggagcttaattccgtcgcttctgagctgtctgcacggcaggaggagagtgaacattctcataaacatttaattgaactccgccgggaatttaagaaaaatgtacctgaggaaatcagagagatggtggctcctgtattaaaaagcttccaagccgaggtggtggcccttagtaagagaagtcaggaggcggaggctgcttttctgagtgtttacaagcaattaattgaagcaccagaccccgtgcctgtgtttgaggcggcacgcagcctagacgacagactgcagccccccagctttgaccccagtgggcagccccggcgagacctccacacttcgtggaagaggaaccccgagctcctcagccccaaagagcagagagaggggacgtcgcctgccgggcccacgctgaccgagggaagccgcctcccaggcattcccgggaaagccctcctgacagaaaccttgctgcagagaaatgaggcggaaaaacaaaagggccttcaagaagtacagatcactttggcggccagactgggggaggcagaggagaaaatcaaagtcctacattcagcgctaaaggctacgcaggcagagctgctagagctgcggcggaagtacgacgaggaggcagcatccaaggcagatgaagtcggcctgatcatgaccaacctggagaaagctaatcagcgagctgaggctgcccagcgggaggtggaaagtctccgggaacagctggcctctgtcaacagctccatccgcctggcttgctgctctccccaggggcccagtggggataaggtgaacttcactctgtgctcgggccctcggctggaggccgcgctggcctccaaggacagggagatcctgcggctgctgaaggacgtgcagcacctccagagctcactgcaggagctggaggaggcatccgccaaccagatcgccgacctggagcggcagctcacggccaagtccgaggccatagaaaagctggaagagaagctccaggcccagtctgactatgaggaaattaaaacggagctgagcatcctgaaagccatgaagctggcctccagcacctgcagcctcccccagggcatggccaagcctgaagactcactgcttattgcaaaggaggccttcttccccacgcagaaattccttctggagaagcccagcctcctggccagccctgaggaagacccatcagaggacgattccatcaaggattcactgggcacggagcagtcctacccctcccctcagcagctcccacctccaccagggccagaagaccccctgtctcccagccccgggcagcccctgctgggccccagcttggggcctgacggcactcggactttctcgctgtcccccttccccagcctggcatcaggggagagactgatgatgcccccagccgccttcaagggagaggcgggcggcctgctggtgttccccccagccttctatggcgccaagccccccacagcccctgccaccccggcccctggccctgagccactgggcggtcctgagcccgcggatggtggtgggggcggagcggcggggcccggggcagaggaggagcagctggacacggcagagatcgccttccaggtgaaggagcagctgctgaaacacaacatcgggcagcgggtgtttgggcattacgtgctggggctgtcgcagggctcggtcagcgagatcctagcccggcccaagccctggcgcaagctcacggtgaagggcaaggagcccttcatcaagatgaagcagttcctgtcggatgagcagaatgtactggcgctcaggaccatccaagtgcggcagcgaggcagcatcaccccgagaatccgcacgcctgagacaggctcagacgacgccatcaagagcattctagagcaggccaagaaggagatcgagtcgcagaagggcggcgagcccaagacctcggtggccccgctgagcatcgccaacggcacgacccccgccagcacctcggaggacgccatcaagagcatcctggagcaggcacgccgtgagatgcaggcgcaacagcaggcgctgctggagatggaggtggcgcccaggggccgctcggtgcccccctcgcccccggagcggccatcactggccaccgcgagccagaacggggccccggccttggtgaagcaggaggagggcagcgggggccccgcgcaggcgccgctcccggtcctgtcccccgccgccttcgtgcagagcatcatccgcaaggtcaagtccgagatcggcgacgccggctacttcgaccaccactgggcctccgaccgcggcctgctcagccgcccctacgcctccgtgtcgccctcgctgtcctcctcctcctcctctggctactctggccagcccaacggccgcgcctggccccgcggggacgaggcccctgtgccccccgaggacgaggcggcggcaggggcggaggacgaaccccccaggacgggcgagctcaaggctgagggcgcgacggccgaggcgggcgcgcggctgccctactacccggcctacgtgccgcgcaccctgaagcccaccgtgccgccgctgacccccgagcagtacgagctgtacatgtaccgtgaggtagacacgctggagctcacccgccaggtcaaggagaagctggccaagaacggcatctgccagaggatcttcggggagaaggtgctgggcctgtcacagggcagcgtgagcgacatgctgtcccggccgaagccatggagcaagctgacgcagaaggggcgggagcccttcatccgcatgcagctgtggctctctgaccagctcggccaggcagtgggccagcagcctggtgcctcccaggccagtcccacagaaccaaggtcctcaccatccccaccccccagccccacagagcctgagaagagctcccaggagccgttgagcctgtccctggagagcagcaaggagaaccagcagccagagggccgctccagctcctcgttgagcgggaagatgtactcaggcagccaggccccagggggcatccaggagatcgtggccatgtcccccgagctggacacgtactccatcaccaagagggtgaaggaggtcctcacagacaacaatctagggcagcggctgtttggggaaagcatcctgggtctgacacagggctccgtgtctgacctgctgtcccggcccaaaccctggcacaagctgagcctgaaggggcgggagccttttgtccgcatgcagctgtggctcaatgacccccataacgtggagaagctgagggatatgaagaagctggagaagaaagcctacctgaaacgtcgctatggcctcatcagcaccggctcagacagtgagtccccggccacccgctcagagtgccccagcccctgcctgcagccccaggacctgagcctcctgcagatcaagaagccccgggtggtgctggcacccgaggagaaggaggcactgcggaaggcctatcagctggaaccctacccctcgcagcagaccatcgagctcctctccttccagctcaacctcaagaccaacaccgtcatcaactggttccacaactacaggtcccggatgcgccgggagatgttggtggaggggacccaggatgagccagaccttgatccaagcgggggtcctggaatcctaccgccaggccactcccacccagaccccaccccgcagagccctgactctgagactgaggaccagaagccaaccgtgaaggaactggagcttcaggagggccctgaggagaacagcacacccctgaccacccaggacaaggcccaagtgaggatcaagcaggaacagatggaggaggatgctgaggaagaggcaggcagccagccccaggactcaggggagctggacaaaggccaaggtccccccaaagaggagcatcccgaccctccgggtaatgatggactcccaaaagtggctcccgggcccctccttccaggtggatccaccccagactgtccctcacttcatccccaacaggagagtgaggccggggagcgacttcacccggaccctttaagttttaagtcagcctcagagtcctcacgctgcagcctggaggtgtcactgaactcgccctcggccgcctcctcaccaggcctcatgatgtctgtgtcacctgtcccctcctcctcagctcccatctccccatccccacctggcgccccccctgccaaagtgccgagtgccagccccactgctgacatggctggagccttgcaccccagtgccaaggtgaaccccaacttgcagcggcggcatgagaagatggccaatctgaacaacatcatttaccgagtagagcgggctgccaatcgggaggaggccctggagtgggagttctgaaggcagggtgagggggcaagggacataccctggtaactaccttccttctcgcacttactctcctcaacaggatggggtaagggagggaggaactcaaccatcaaaatgtggacagcaatgttatgccgtttacgttttttgttgtaatcctagttctatgaagctgtgtgagcaggtgggtcaaatgccattgcctccacttttctgcacccccctgctcctcttcaccctgacccctctgcaggaggcagaagcaaaatggcaccacatattcacctgaaaactccaaactcttttagaaaaataaataaatatttatagacctcttttagatattttaataaaggatcctttggaatttatcccagctgatgctgttttgatattacagagagttataaaatcaggatgctgtcacaactgttgcgaagtatacactgaagttgtgtcgtttttgccactagatgagattaaaagaagacaattattcaaagccatcacaaaacactataagactgaccaaaatttagataacctttgaaccacgatttttttccacatctgtctgtgagacacagcgcaatgctactgcccttccagaaactgtgctaaaaagagaaagtccaaaagactctaaacaaaaacctcgacgccgttgaggatgtgtttcattctggtggtctgttttgcaagcttgataacagaatgtccgtgccattgtaaatgttgtagagatgtgggccgtggcccaaccgtcctatatgagatgtagcatggtacagaacaaactgcttacacaggtctcactagttagaaacctgtgggccatggaggtcagacatccatcttgtccatctataggcaagaagtgtttccagatcctttggaaaggtgggcatggggcaggtgcttggagagtggcgtttgagccagagcgaccccatttcccgtgtgaaccataggcacaacccaggaagtttccccacttgtaggagtgtgggtattccagagcaagactgtggccaccatcttcccctcttggtgttttccgaaagtgacagtgttggtcatcccatgaccactgaagcttagtaaccagcgccaaaaagtagattcatcaaactagagaccccagctccccttctcgccatcttctttctcaagttgaccgtggtgctgtttctggaaggcatctgcaactccaagtccatgcagaactctggaaggccaagttcatcgcagcatgttcaccatatcccagcctccaaatctatcctcctaccttccaacgcatgacctgttggggagcagagacttaacccccaactcagaggaacccttcctccagcgtctttggcatggtttctagggtgagagttcccaatttggatagaacggccaccatattggttactgaatctctctcccttgtttttattacgtttcctttttcaaactgtccatgggaaggctgaattgagtgactccccagaatgaagatgagaaggtgaatataatcaatgccaatgtaatgccagcgggtgagatggccgatggaggtttcaaagatgtagctagcattttgaaaccatatgggcaaaacccggcaaccagaaggggacagataaggaccgttccagaaatcccaactctcacacccagcccaggctgcagtctccacaccaaacagtcaacaaaacacaaaccctgaaggaaaaccttttccatacacccaggctatgcattgaagagttttccactgtatacatttttatccagatgaaggtatttttatattttgacaataggaaacagtgaccattttcagagtaatcaaatctggaacaaatgaaacatcttttagccaccaccaccctgttgcaattaagacaaccgtgggggaacacaccactttttactgttgaaaccaacacaacgttgaaatccaggcttatacgcagactccgattcctagagaactaaatttggctttagtgtgacgggatttgattaagcacttagtatagtcttttgaacacggaaatcctgttgtacttaaagctagcggacccgtgaacaactttgtcaggttcacgtcctataacggttaaaaaacacacacacacatacacaaaccgtttctatgagagattgatgaactttgtttaaaattttaaaaaaaggaacacgttctgtaaacgagtcgctaaatacagaattgtataataaaaaaaaaaaaa

SEQ ID NO: 30 - protein, 1486 aa, Homo sapiens
MAANVGSMFQYWKRFDLRRLQKELNSVASELSARQEESEHSHKHLIELRREFKKNVPEEIREMVAPVLKSFQAEVVALSKRSQEAEAAFLSVYKQLIEAPDPVPVFEAARSLDDRLQPPSFDPSGQPRRDLHTSWKRNPELLSPKEQREGTSPAGPTLTEGSRLPGIPGKALLTETLLQRNEAEKQKGLQEVQITLAARLGEAEEKIKVLHSALKATQAELLELRRKYDEEAASKADEVGLIMTNLEKANQRAEAAQREVESLREQLASVNSSIRLACCSPQGPSGDKVNFTLCSGPRLEAALASKDREILRLLKDVQHLQSSLQELEEASANQIADLERQLTAKSEAIEKLEEKLQAQSDYEEIKTELSILKAMKLASSTCSLPQGMAKPEDSLLIAKEAFFPTQKFLLEKPSLLASPEEDPSEDDSIKDSLGTEQSYPSPQQLPPPPGPEDPLSPSPGQPLLGPSLGPDGTRTFSLSPFPSLASGERLMMPPAAFKGEAGGLLVFPPAFYGAKPPTAPATPAPGPEPLGGPEPADGGGGGAAGPGAEEEQLDTAEIAFQVKEQLLKHNIGQRVFGHYVLGLSQGSVSEILARPKPWRKLTVKGKEPFIKMKQFLSDEQNVLALRTIQVRQRGSITPRIRTPETGSDDAIKSILEQAKKEIESQKGGEPKTSVAPLSIANGTTPASTSEDAIKSILEQARREMQAQQQALLEMEVAPRGRSVPPSPPERPSLATASQNGAPALVKQEEGSGGPAQAPLPVLSPAAFVQSIIRKVKSEIGDAGYFDHHWASDRGLLSRPYASVSPSLSSSSSSGYSGQPNGRAWPRGDEAPVPPEDEAAAGAEDEPPRTGELKAEGATAEAGARLPYYPAYVPRTLKPTVPPLTPEQYELYMYREVDTLELTRQVKEKLAKNGICQRIFGEKVLGLSQGSVSDMLSRPKPWSKLTQKGREPFIRMQLWLSDQLGQAVGQQPGASQASPTEPRSSPSPPPSPTEPEKSSQEPLSLSLESSKENQQPEGRSSSSLSGKMYSGSQAPGGIQEIVAMSPELDTYSITKRVKEVLTDNNLGQRLFGESILGLTQGSVSDLLSRPKPWHKLSLKGREPFVRMQLWLNDPHNVEKLRDMKKLEKKAYLKRRYGLISTGSDSESPATRSECPSPCLQPQDLSLLQIKKPRVVLAPEEKEALRKAYQLEPYPSQQTIELLSFQLNLKTNTVINWFHNYRSRMRREMLVEGTQDEPDLDPSGGPGILPPGHSHPDPTPQSPDSETEDQKPTVKELELQEGPEENSTPLTTQDKAQVRIKQEQMEEDAEEEAGSQPQDSGELDKGQGPPKEEHPDPPGNDGLPKVAPGPLLPGGSTPDCPSLHPQQESEAGERLHPDPLSFKSASESSRCSLEVSLNSPSAASSPGLMMSVSPVPSSSAPISPSPPGAPPAKVPSASPTADMAGALHPSAKVNPNLQRRHEKMANLNNIIYRVERAANREEALEWEF

SEQ ID NO: 31 - DNA, 4628 bp, Homo sapiens
gaacgtagctagctgcaagcagaggccggcatgaccaccgagcagcgacgcagcctgcaagccttccaggattatatccggaagaccctggaccctacctacatcctgagctacatggccccctggtttagggaggaagaggtgcagtatattcaggctgagaaaaacaacaagggcccaatggaggctgccacactttttctcaagttcctgttggagctccaggaggaaggctggttccgtggctttttggatgccctagaccatgcaggttattctggactttatgaagccattgaaagttgggatttcaaaaaaattgaaaagttggaggagtatagattacttttaaaacgtttacaaccagaatttaaaaccagaattatcccaaccgatatcatttctgatctgtctgaatgtttaattaatcaggaatgtgaagaaattctacagatttgctctactaaggggatgatggcaggtgcagagaaattggtggaatgccttctcagatcagacaaggaaaactggcccaaaactttgaaacttgctttggagaaagaaaggaacaagttcagtgaactgtggattgtagagaaaggtataaaagatgttgaaacagaagatcttgaggataagatggaaacttctgacatacagattttctaccaagaagatccagaatgccagaatcttagtgagaattcatgtccaccttcagaagtgtctgatacaaacttgtacagcccatttaaaccaagaaattaccaattagagcttgctttgcctgctatgaaaggaaaaaacacaataatatgtgctcctacaggttgtggaaaaacctttgtttcactgcttatatgtgaacatcatcttaaaaaattcccacaaggacaaaaggggaaagttgtcttttttgcgaatcagatcccagtgtatgaacagcagaaatctgtattctcaaaatactttgaaagacatgggtatagagttacaggcatttctggagcaacagctgagaatgtcccagtggaacagattgttgagaacaatgacatcatcattttaactccacagattcttgtgaacaaccttaaaaagggaacgattccatcactatccatctttactttgatgatatttgatgaatgccacaacactagtaaacaacacccgtacaatatgatcatgtttaattatctagatcagaaacttggaggatcttcaggcccactgccccaggtcattgggctgactgcctcggttggtgttggggatgccaaaaacacagatgaagccttggattatatctgcaagctgtgtgcttctcttgatgcgtcagtgatagcaacagtcaaacacaatctggaggaactggagcaagttgtttataagccccagaagtttttcaggaaagtggaatcacggattagcgacaaatttaaatacatcatagctcagctgatgagggacacagagagtctggcaaagagaatctgcaaagacctcgaaaacttatctcaaattcaaaatagggaatttggaacacagaaatatgaacaatggattgttacagttcagaaagcatgcatggtgttccagatgccagacaaagatgaagagagcaggatttgtaaagccctgtttttatacacttcacatttgcggaaatataatgatgccctcattatcagtgagcatgcacgaatgaaagatgctctggattacttgaaagacttcttcagcaatgtccgagcagcaggattcgatgagattgagcaagatcttactcagagatttgaagaaaagctgcaggaactagaaagtgtttccagggatcccagcaatgagaatcctaaacttgaagacctctgcttcatcttacaagaagagtaccacttaaacccagagacaataacaattctctttgtgaaaaccagagcacttgtggacgctttaaaaaattggattgaaggaaatcctaaactcagttttctaaaacctggcatattgactggacgtggcaaaacaaatcagaacacaggaatgaccctcccggcacagaagtgtatattggatgcattcaaagccagtggagatcacaatattctgattgccacctcagttgctgatgaaggcattgacattgcacagtgcaatcttgtcatcctttatgagtatgtgggcaatgtcatcaaaatgatccaaaccagaggcagaggaagagcaagaggtagcaagtgcttccttctgactagtaatgctggtgtaattgaaaaagaacaaataaacatgtacaaagaaaaaatgatgaatgactctattttacgccttcagacatgggacgaagcagtatttagggaaaagattctgcatatacagactcatgaaaaattcatcagagatagtcaagaaaaaccaaaacctgtacctgataaggaaaataaaaaactgctctgcagaaagtgcaaagccttggcatgttacacagctgacgtaagagtgatagaggaatgccattacactgtgcttggagatgcttttaaggaatgctttgtgagtagaccacatcccaagccaaagcagttttcaagttttgaaaaaagagcaaagatattctgtgcccgacagaactgcagccatgactggggaatccatgtgaagtacaagacatttgagattccagttataaaaattgaaagttttgtggtggaggatattgcaactggagttcagacactgtactcgaagtggaaggactttcattttgagaagataccatttgatccagcagaaatgtccaaatgatatcaggtcctcaatcttcagctacagggaatgagtaactttgagtggagaagaaacaaacatagtgggtataatcatggatcgcttgtacccctgtgaaaatatattttttaaaaatatctttagcagtttgtactatattatatatgcaaagcacaaatgagtgaatcacagcactgagtattttgtaggccaacagagctcatagtacttgggaaaaattaaaaagcctcatttctagccttctttttagagtcaactgccaacaaacacacagtaatcactctgtacacactgggatagatgaatgaatggaatgttgggaatttttatctccctttgtctccttaacctactgtaaactggcttttgcccttaacaatctactgaaattgttcttttgaaggttaccagtgactctggttgccaaatccactgggcacttcttaaccttctatttgacctctgcgcatttggccctgttgagcactcttcttgaagctctccctgggcttctctctcttctagttctattctagtctttttttattgagtcctcctctttgctgatcccttccaagggttcaatatatatacatgtatatactgtacatatgtatatgtaactaatatacatacatacaggtatgtatatgtaatggttatatgtactcatgttcctggtgtagcaacgtgtggtatggctacacagagaacatgagaacataaagccatttttatgcttactactaaaagctgtccactgtagagttgctgtatgtagcaatgtgtatccactctacagtggtcagcttttagtagagagcataaaaatgataaaatacttcttgaaaacttagtttactatacatcttgccctattaatatgttctcttaacgtgtgccattgttctctttgaccattttcctataatgatgttgatgttcaacacctggactgaatgtctgttctcagatcccttggatgttacagatgaggcagtctgactgtcctttctacttgaaagattagaatatgtatccaaatggcattcacgtgtcacttagcaaggtttgctgatgcttcaaagagcttagtttgcggtttcctggacgtggaaacaagtatctgagttccctggagatcaacgggatgaggtgttacagctgcctccctcttcatgcaatctggtgagcagtggtgcaggcggggagccagagaaacttgccagttatataacttctctttggcttttcttcatctgtaaaacaaggataatactgaactgtaagggttagtggagagtttttaattaaaagaatgtgtgaaaagtacatgacacagtagttgcttgataatagttactagtagtagtattcttactaagacccaatacaaatggattatttaaaccaagtttatgagttggttttttttcattttctatttgtattttattaagagtgtcttttcttatgtgattttttttaattgctatttgatatggtttggctatatgtccccacccaaatctcatcttgaattataatccccatgtgtcaagggagggacctgacgggaggtgattggatcacgggggcagttgtccccatgctgttcttgggatagtgagttagttctcatgagatctgatggttttataagtgtttgacaattcctcctttacacacactctctctctcatctgctgccatgtaagacttgcctgcttccccttctgccatgattgtaagtttcctgaggcctcctcagccatgtggaactgtgaatctattaagcctcttttctttataaatga

SEQ ID NO: 32 - protein, 925 aa, Homo sapiens
MTTEQRRSLQAFQDYIRKTLDPTYILSYMAPWFREEEVQYIQAEKNNKGPMEAATLFLKFLLELQEEGWFRGFLDALDHAGYSGLYEAIESWDFKKIEKLEEYRLLLKRLQPEFKTRIIPTDIISDLSECLINQECEEILQICSTKGMMAGAEKLVECLLRSDKENWPKTLKLALEKERNKFSELWIVEKGIKDVETEDLEDKMETSDIQIFYQEDPECQNLSENSCPPSEVSDTNLYSPFKPRNYQLELALPAMKGKNTIICAPTGCGKTFVSLLICEHHLKKFPQGQKGKVVFFANQIPVYEQQKSVFSKYFERHGYRVTGISGATAENVPVEQIVENNDIIILTPQILVNNLKKGTIPSLSIFTLMIFDECHNTSKQHPYNMIMFNYLDQKLGGSSGPLPQVIGLTASVGVGDAKNTDEALDYICKLCASLDASVIATVKHNLEELEQVVYKPQKFFRKVESRISDKFKYIIAQLMRDTESLAKRICKDLENLSQIQNREFGTQKYEQWIVTVQKACMVFQMPDKDEESRICKALFLYTSHLRKYNDALIISEHARMKDALDYLKDFFSNVRAAGFDEIEQDLTQRFEEKLQELESVSRDPSNENPKLEDLCFILQEEYHLNPETITILFVKTRALVDALKNWIEGNPKLSFLKPGILTGRGKTNQNTGMTLPAQKCILDAFKASGDHNILIATSVADEGIDIAQCNLVILYEYVGNVIKMIQTRGRGRARGSKCFLLTSNAGVIEKEQINMYKEKMMNDSILRLQTWDEAVFREKILHIQTHEKFIRDSQEKPKPVPDKENKKLLCRKCKALACYTADVRVIEECHYTVLGDAFKECFVSRPHPKPKQFSSFEKRAKIFCARQNCSHDWGIHVKYKTFEIPVIKIESFVVEDIATGVQTLYSKWKDFHFEKIPFDPAEMSK

SEQ ID NO: 33 - DNA, 4493 bp, Homo sapiens
gccatttcgccgattcctccatgcgagttgctgtgcgtttctctgttgtctcggtagaaggccagagtcacacacggtcctaagagctgggcaccaggaagcgaaggctgatctgaagaagacacttgaatcatgggtgacgttaaaaattttctgtatgcctggtgtggcaaaaggaagatgaccccatcctatgaaattagagcagtggggaacaaaaacaggcagaaattcatgtgtgaggttcaggtggaaggttataattacactggcatgggaaattccaccaataaaaaagatgcacaaagcaatgctgccagagactttgttaactatttggttcgaataaatgaaataaagagtgaagaagttccagcttttggggtagcatctccgcccccacttactgatactcctgacactacagcaaatgctgaaggagatttaccaacaaccatgggaggacctcttcctccacatctggctctcaaagcagaaaataattctgaggtaggggcctctggctatggtgttcctgggcccacctgggaccgaggagccaacttgaaggattactactcaagaaaggaagaacaagaagtgcaagcgactctagaatcagaagaagtggatttaaatgctgggcttcatggaaactggaccttggaaaatgctaaagctcgtctaaaccaatattttcagaaagaaaagatccaaggagaatataagtacacccaagtgggtcctgatcacaacaggagctttattgcagaaatgaccatttatatcaagcagctgggcagaaggatttttgcacgagaacatggatcaaataagaaattggcagcacagtcctgtgccctgtcacttgtcagacaactgtaccatcttggagtggttgaagcttactccggacttacaaagaagaaggaaggagagacagtggagccttacaaagtaaacctctctcaagatttagagcatcagctgcaaaacatcattcaagagctaaatcttgagattttgcccccgcctgaagatccttctgtgccagttgcactcaacattggcaaattggctcagttcgaaccatctcagcgacaaaaccaagtgggtgtggttccttggtcacctccacaatccaactggaatccttggactagtagcaacattgatgaggggcctctggcttttgctactccagagcaaataagcatggacctcaagaatgaattgatgtaccagttggaacaggatcatgatttgcaagcaatcttgcaggagagagagttactgcctgtgaagaaatttgaaagtgagattctggaagcaatcagccaaaattcagttgtcattattagaggggctactggatgtgggaaaaccacacaggttccccagttcattctagatgactttatccagaatgaccgagcagcagagtgtaacatcgtagtaactcagcccagaagaatcagtgcggtttctgtggcagagcgagttgcatttgaaagaggagaagagcctggaaaaagctgtggctacagcgttcgatttgagtctatacttcctcgtcctcatgccagtataatgttttgtactgtaggtgtgctcctgagaaaattagaagcaggcattcgaggaatcagtcatgtaattgtagatgaaatacatgaaagagatattaatactgacttccttttggtagtactgcgtgatgttgttcaggcttatcctgaagttcgcattgttcttatgtctgctactattgataccagcatgttttgtgaatatttcttcaattgccccatcattgaagtttatgggaggacttacccagttcaagaatattttctggaagactgcattcagatgacccactttgttcctccaccaaaagacaaaaagaagaaggataaggatgatgatggtggtgaggatgatgatgcaaattgcaacttgatctgtggtgatgaatatggtccagaaacaaggttgagcatgtctcaattgaacgaaaaggaaactccttttgaactcatcgaggctctacttaagtacattgaaacccttaatgttcctggagctgtgttggtttttttgcctggctggaatctgatttatactatgcagaagcatttggaaatgaatccacattttggaagccatcggtatcagattctacccctgcattctcagattcctcgagaggaacagcgcaaagtgtttgatccagtaccagttggagtaaccaaggttattttgtccacaaatattgctgaaacaagcattaccataaacgatgttgtttatgtcattgactcctgcaagcagaaagtgaaactcttcactgctcacaacaatatgaccaactatgctaccgtatgggcatcaaaaacaaaccttgagcaacggaaagggcgagctggccgagtacggcctggattctgctttcacctgtgcagccgagctcgttttgagagacttgaaacccacatgacaccagagatgttccgaacaccattgcatgaaattgctcttagcataaaacttctgcgtctaggaggaattggccaatttctggccaaagcaattgaacctccccctttggatgctgtgattgaagcagaacacactcttagagagcttgatgcattagatgccaatgatgagttgactcctttgggacgaatcctggctaaactccccattgagcctcgttttggcaaaatgatgataatggggtgtattttctacgtgggagatgctatctgtaccattgctgctgctacctgctttccagagcctttcatcaatgaaggaaagcggctgggctatatccatcgaaattttgctggaaacagattttctgatcacgtagcccttttatcagtattccaagcctgggatgatgctagaatgggtggagaagaagcagagatacgtttttgtgagcacaaaagacttaatatggctacactaagaatgacttgggaagccaaagttcagctcaaagagattttgattaattctgggtttccagaagattgtttgttgacacaagtgtttactaacactggaccagataataatttggatgttgttatctccctcctggcctttggtgtgtaccccaatgtatgctatcataaggaaaagaggaagattctcaccactgaagggcgtaatgcacttatccacaaatcatctgttaattgtccttttagtagccaagacatgaagtacccatctcccttctttgtatttggtgaaaagattcgaactcgagccatctctgctaaaggcatgactttagtcacccccctgcagttgcttctctttgcctccaagaaagtccaatctgatgggcagattgtgcttgtagatgactggattaaactgcaaatatctcatgaagctgctgcctgtatcactggtctccgggcagccatggaggctttggttgttgaagtaaccaaacaacctgctatcatcagccagttggaccccgtaaatgaacgtatgctgaacatgatccgtcagatctctagaccctcagctgctggtatcaaccttatgattggcagtacacggtatggagatggtccacgtcctcccaagatggcccgatacgacaatggaagcggatatagaaggggaggttctagttacagtggtggaggctatggcggtggctatagcagtggaggctatggtagcggaggctatggtggcagcgccaactcctttcgggcaggatatggtgcaggtgttggtggaggctatagaggagtttcccgaggtggctttagaggcaactctggaggagactacagagggcctagtggaggctacagaggatctgggggattccagcgaggaggtggtaggggggcctatggaactggctactttggacagggaagaggaggtggcggctattaaaacttggttatgtcagttcctgtgtgtagacagtaaggaaaaaaaggcatgctatgtgttacgtgttttttccagtatgtttatttgccaccaaaaagtaaatgcattttcacccattctgtggttcattgtagtttaaggaaaccaagcatatagatgcattagtgattttgtttatattatgtaaaatataacgatctcttaaaaataccacagtttgtattttttctttaaggagtaaagatttgcctttaaataacttggtattttcctggctttcgtttaatacaatagaaaataaagtattacaccgaatacttgccgtgtagtttgtttgttgacctcgtatgttagaaaattttacaatgccagctacatctgttgattttaaatgtcagagaagttgtaccctgtttcaaaagtatactaagtgatactacttgtaatagaataaatcatcttggaattgaattgttaccttttgaagtaaatactggcaagtgcacaagccacataaacctgaataaaacttttgacctagggttgaa

SEQ ID NO: 34 - protein, 1270 aa, Homo sapiens
MGDVKNFLYAWCGKRKMTPSYEIRAVGNKNRQKFMCEVQVEGYNYTGMGNSTNKKDAQSNAARDFVNYLVRINEIKSEEVPAFGVASPPPLTDTPDTTANAEGDLPTTMGGPLPPHLALKAENNSEVGASGYGVPGPTWDRGANLKDYYSRKEEQEVQATLESEEVDLNAGLHGNWTLENAKARLNQYFQKEKIQGEYKYTQVGPDHNRSFIAEMTIYIKQLGRRIFAREHGSNKKLAAQSCALSLVRQLYHLGVVEAYSGLTKKKEGETVEPYKVNLSQDLEHQLQNIIQELNLEILPPPEDPSVPVALNIGKLAQFEPSQRQNQVGVVPWSPPQSNWNPWTSSNIDEGPLAFATPEQISMDLKNELMYQLEQDHDLQAILQERELLPVKKFESEILEAISQNSVVIIRGATGCGKTTQVPQFILDDFIQNDRAAECNIVVTQPRRISAVSVAERVAFERGEEPGKSCGYSVRFESILPRPHASIMFCTVGVLLRKLEAGIRGISHVIVDEIHERDINTDFLLVVLRDVVQAYPEVRIVLMSATIDTSMFCEYFFNCPIIEVYGRTYPVQEYFLEDCIQMTHFVPPPKDKKKKDKDDDGGEDDDANCNLICGDEYGPETRLSMSQLNEKETPFELIEALLKYIETLNVPGAVLVFLPGWNLIYTMQKHLEMNPHFGSHRYQILPLHSQIPREEQRKVFDPVPVGVTKVILSTNIAETSITINDVVYVIDSCKQKVKLFTAHNNMTNYATVWASKTNLEQRKGRAGRVRPGFCFHLCSRARFERLETHMTPEMFRTPLHEIALSIKLLRLGGIGQFLAKAIEPPPLDAVIEAEHTLRELDALDANDELTPLGRILAKLPIEPRFGKMMIMGCIFYVGDAICTIAAATCFPEPFINEGKRLGYIHRNFAGNRFSDHVALLSVFQAWDDARMGGEEAEIRFCEHKRLNMATLRMTWEAKVQLKEILINSGFPEDCLLTQVFTNTGPDNNLDVVISLLAFGVYPNVCYHKEKRKILTTEGRNALIHKSSVNCPFSSQDMKYPSPFFVFGEKIRTRAISAKGMTLVTPLQLLLFASKKVQSDGQIVLVDDWIKLQISHEAAACITGLRAAMEALVVEVTKQPAIISQLDPVNERMLNMIRQISRPSAAGINLMIGSTRYGDGPRPPKMARYDNGSGYRRGGSSYSGGGYGGGYSSGGYGSGGYGGSANSFRAGYGAGVGGGYRGVSRGGFRGNSGGDYRGPSGGYRGSGGFQRGGGRGAYGTGYFGQGRGGGGY

SEQ ID NO: 35 - DNA, 3069 bp, Homo sapiens
gagtgtcgggcgcggcaggaggacgaggcagggcgggcgggcgctctaagggttctgctctgactccaggttgggacagcgtcttcgctgctgctggatagtcgtgttttcggggatcgaggatactcaccagaaaccgaaaatgccgaaaccaatcaatgtccgagttaccaccatggatgcagagctggagtttgcaatccagccaaatacaactggaaaacagctttttgatcaggtggtaaagactatcggcctccgggaagtgtggtactttggcctccactatgtggataataaaggatttcctacctggctgaagctggataagaaggtgtctgcccaggaggtcaggaaggagaatcccctccagttcaagttccgggccaagttctaccctgaagatgtggctgaggagctcatccaggacatcacccagaaacttttcttcctccaagtgaaggaaggaatccttagcgatgagatctactgcccccctgagactgccgtgctcttggggtcctacgctgtgcaggccaagtttggggactacaacaaagaagtgcacaagtctgggtacctcagctctgagcggctgatccctcaaagagtgatggaccagcacaaacttaccagggaccagtgggaggaccggatccaggtgtggcatgcggaacaccgtgggatgctcaaagataatgctatgttggaatacctgaagattgctcaggacctggaaatgtatggaatcaactatttcgagataaaaaacaagaaaggaacagacctttggcttggagttgatgcccttggactgaatatttatgagaaagatgataagttaaccccaaagattggctttccttggagtgaaatcaggaacatctctttcaatgacaaaaagtttgtcattaaacccatcgacaagaaggcacctgactttgtgttttatgccccacgtctgagaatcaacaagcggatcctgcagctctgcatgggcaaccatgagttgtatatgcgccgcaggaagcctgacaccatcgaggtgcagcagatgaaggcccaggcccgggaggagaagcatcagaagcagctggagcggcaacagctggaaacagagaagaaaaggagagaaaccgtggagagagagaaagagcagatgatgcgcgagaaggaggagttgatgctgcggctgcaggactatgaggagaagacaaagaaggcagagagagagctctcggagcagattcagagggccctgcagctggaggaggagaggaagcgggcacaggaggaggccgagcgcctagaggctgaccgtatggctgcactgcgggctaaggaggagctggagagacaggcggtggatcagataaagagccaggagcagctggctgcggagcttgcagaatacactgccaagattgccctcctggaagaggcgcggaggcgcaaggaggatgaagttgaagagtggcagcacagggccaaagaagcccaggatgacctggtgaagaccaaggaggagctgcacctggtgatgacagcacccccgcccccaccaccccccgtgtacgagccggtgagctaccatgtccaggagagcttgcaggatgagggcgcagagcccacgggctacagcgcggagctgtctagtgagggcatccgggatgaccgcaatgaggagaagcgcatcactgaggcagagaagaacgagcgtgtgcagcggcagctgctgacgctgagcagcgagctgtcccaggcccgagatgagaataagaggacccacaatgacatcatccacaacgagaacatgaggcaaggccgggacaagtacaagacgctgcggcagatccggcagggcaacaccaagcagcgcatcgacgagttcgaggccctgtaacagccaggccaggaccaagggcagaggggtgctcatagcgggcgctgccagccccgccacgcttgtgtctttagtgctccaagtctaggaactccctcagatcccagttcctttagaaagcagttacccaacagaaacattctgggctgggaaccagggaggcgccctggtttgttttccccagttgtaatagtgccaagcaggcctgattctcgcgattattctcgaatcacctcctgtgttgtgctgggagcaggactgattgaattacggaaaatgcctgtaaagtctgagtaagaaacttcatgctggcctgtgtgatacaagagtcagcatcattaaaggaaacgtggcaggacttccatctgtgccatacttgttctgtattcgaaatgagctcaaattgattttttaatttctatgaaggatccatctttgtatatttacatgcttagaggggtgaaaattattttggaaattgagtctgaagcactctcgcacacacagtgattccctcctcccgtcactccacgcagctggcagagagcacagtgatcaccagcgtgagtggtggaggaggacacttggatttttttttttgttttttttttttttgcttaacagttttagaatacattgtacttatacaccttattaatgatcagctatatactatttatatacaagtgataatacagatttgtaacattagttttaaaaagggaaagttttgttctgtatattttgttaccttttacagaataaaagaattacatatgaaaaaccctctaaaccatggcacttgatgtgatgtggcaggagggcagtggtggagctggacctgcctgctgcagtcacgtgtaaacaggattattattagtgttttatgcatgtaatggactatgcacacttttaattttgtcagattcacacatgccactatgagctttcagactccagctgtgaagagactctgtttgcttgtgtttgtttgtttgcagtctctctctgccatggccttggcaggctgctggaaggcagcttgtggaggccgttggttccgcccactcattccttctcgtgcactgctttctccttcacagctaagatgccatgtgcaggtggattccatgccgcagacatgaaataaaagctttgcaaaggca

SEQ ID NO: 36 - protein, 586 aa, Homo sapiens
MPKPINVRVTTMDAELEFAIQPNTTGKQLFDQVVKTIGLREVWYFGLHYVDNKGFPTWLKLDKKVSAQEVRKENPLQFKFRAKFYPEDVAEELIQDITQKLFFLQVKEGILSDEIYCPPETAVLLGSYAVQAKFGDYNKEVHKSGYLSSERLIPQRVMDQHKLTRDQWEDRIQVWHAEHRGMLKDNAMLEYLKIAQDLEMYGINYFEIKNKKGTDLWLGVDALGLNIYEKDDKLTPKIGFPWSEIRNISFNDKKFVIKPIDKKAPDFVFYAPRLRINKRILQLCMGNHELYMRRRKPDTIEVQQMKAQAREEKHQKQLERQQLETEKKRRETVEREKEQMMREKEELMLRLQDYEEKTKKAERELSEQIQRALQLEEERKRAQEEAERLEADRMAALRAKEELERQAVDQIKSQEQLAAELAEYTAKIALLEEARRRKEDEVEEWQHRAKEAQDDLVKTKEELHLVMTAPPPPPPPVYEPVSYHVQESLQDEGAEPTGYSAELSSEGIRDDRNEEKRITEAEKNERVQRQLLTLSSELSQARDENKRTHNDIIHNENMRQGRDKYKTLRQIRQGNTKQRIDEFEAL

SEQ ID NO: 37 - DNA, 3628 bp, Homo sapiens
agagcatcagcaagagtagcagcgagcagccgcgctggtggcggcggcgcgtcgttgcagttgcgccatctgtcaggagcggagccggcgaggagggggctgccgcgggcgaggaggaggggtcgccgcgagccgaaggccttcgagacccgcccgccgcccggcggcgagagtagaggcgaggttgttgtgcgagcggcgcgtcctctcccgcccgggcgcgccgcgcttctcccagcgcaccgaggaccgcccgggcgcacacaaagccgccgcccgcgccgcaccgcccggcggccgccgcccgcgccagggagggattcggccgccgggccggggacaccccggcgccgccccctcggtgctctcggaaggcccaccggctcccgggcccgccggggaccccccggagccgcctcggccgcgccggaggagggcggggagaggaccatgtgagtgggctccggagcctcagcgccgcgcagtttttttgaagaagcaggatgctgatctaaacgtggaaaaagaccagtcctgcctctgttgtagaagacatgtggtgtatataaagtttgtgatcgttggcggacattttggaatttagataatgggctgtgtgcaatgtaaggataaagaagcaacaaaactgacggaggagagggacggcagcctgaaccagagctctgggtaccgctatggcacagaccccacccctcagcactaccccagcttcggtgtgacctccatccccaactacaacaacttccacgcagccgggggccaaggactcaccgtctttggaggtgtgaactcttcgtctcatacggggaccttgcgtacgagaggaggaacaggagtgacactctttgtggccctttatgactatgaagcacggacagaagatgacctgagttttcacaaaggagaaaaatttcaaatattgaacagctcggaaggagattggtgggaagcccgctccttgacaactggagagacaggttacattcccagcaattatgtggctccagttgactctatccaggcagaagagtggtactttggaaaacttggccgaaaagatgctgagcgacagctattgtcctttggaaacccaagaggtacctttcttatccgcgagagtgaaaccaccaaaggtgcctattcactttctatccgtgattgggatgatatgaaaggagaccatgtcaaacattataaaattcgcaaacttgacaatggtggatactacattaccacccgggcccagtttgaaacacttcagcagcttgtacaacattactcagagagagctgcaggtctctgctgccgcctagtagttccctgtcacaaagggatgccaaggcttaccgatctgtctgtcaaaaccaaagatgtctgggaaatccctcgagaatccctgcagttgatcaagagactgggaaatgggcagtttggggaagtatggatgggtacctggaatggaaacacaaaagtagccataaagactcttaaaccaggcacaatgtcccccgaatcattccttgaggaagcgcagatcatgaagaagctgaagcacgacaagctggtccagctctatgcagtggtgtctgaggagcccatctacatcgtcaccgagtatatgaacaaaggaagtttactggatttcttaaaagatggagaaggaagagctctgaaattaccaaatcttgtggacatggcagcacaggtggctgcaggaatggcttacatcgagcgcatgaattatatccatagagatctgcgatcagcaaacattctagtggggaatggactcatatgcaagattgctgacttcggattggcccgattgatagaagacaatgagtacacagcaagacaaggtgcaaagttccccatcaagtggacggcccccgaggcagccctgtacgggaggttcacaatcaagtctgacgtgtggtcttttggaatcttactcacagagctggtcaccaaaggaagagtgccatacccaggcatgaacaaccgggaggtgctggagcaggtggagcgaggctacaggatgccctgcccgcaggactgccccatctctctgcatgagctcatgatccactgctggaaaaaggaccctgaagaacgccccacttttgagtacttgcagagcttcctggaagactactttaccgcgacagagccccagtaccaacctggtgaaaacctgtaaggcccgggtctgcggagagaggccttgtcccagaggctgccccacccctccccattagctttcaattccgtagccagctgctccccagcagcggaaccgcccaggatcagattgcatgtgactctgaagctgacgaacttccatggccctcattaatgacacttgtccccaaatccgaacctcctctgtgaagcattcgagacagaaccttgttatttctcagactttggaaaatgcattgtatcgatgttatgtaaaaggccaaacctctgttcagtgtaaatagttactccagtgccaacaatcctagtgctttccttttttaaaaatgcaaatcctatgtgattttaactctgtcttcacctgattcaactaaaaaaaaaaaagtattattttccaaaagtggcctctttgtctaaaacaataaaattttttttcatgttttaacaaaaaccaatcaggacaggtgtttgtttttgttttcttttttataaatatgaatatatataatatatatgtccctgtacatatacaatgtgggtgctaatgtggagactgtggccggcctgagccaccaagctgcgggacccagagggaggattttactgcaagtcagcatcaaagcaccggtgttattctgaaaacaccagtggcctcatttttggcttttgcaaagcatgaattttttcatttggattgcactttcctggttcatgactgtacctgtaggtggttgttactttgactcttttcaggaaccaccccccaagctgaatttacaagttctgttagcactatttgcttcaacttactgcgatttgttctcaaaacttaaaaataagcaagcaaatggctgatactaccaagagaactggaagatggataccacacaaacttcttgtataaaaatatgaatgctgaaatgtttcagacatttttaatttaataaacctgtaaccacatttaagtgatctaaaacccatagcattgtagtcatggcaacccgctaaactttctcatgcaactaaaatttctgggggaaatgagggtgggggttgtacatttcccattgtaaaataagtgttttaaatgtcctgtactgctaacgaatgactttctatatgtccaggagttctccagtggaataactatgcactactttacatttcatggggatgcacaaaaacaaaaaagtattacatttttagttgctgtttgtaccaaccttaaattacatatgtttaacaacaacaaatcaaaaatcctatttctattgagtttttaatactgactagcaactctgaagtcttaattccttttttgttatgatttatttgtgagtttacatttttaaattgtttaactttcttaatttagtaattaaaaagagagcattttacatttgaa

SEQ ID NO: 38 - DNA, 3238 bp, Homo sapiens
ggctcccgggcccgccggggaccccccggagccgcctcggccgcgccggaggagggcggggagaggaccatgtgagtgggctccggagcctcagcgccgcgcagtttttttgaagaagcaggatgctgatctaaacgtggaaaaagaccagtcctgcctctgttgtagaagacatgtggtgtatataaagtttgtgatcgttggcggacattttggaatttagataatgggctgtgtgcaatgtaaggataaagaagcaacaaaactgacggaggagagggacggcagcctgaaccagagctctgggtaccgctatggcacagaccccacccctcagcactaccccagcttcggtgtgacctccatccccaactacaacaacttccacgcagccgggggccaaggactcaccgtctttggaggtgtgaactcttcgtctcatacggggaccttgcgtacgagaggaggaacaggagtgacactctttgtggccctttatgactatgaagcacggacagaagatgacctgagttttcacaaaggagaaaaatttcaaatattgaacagctcggaaggagattggtgggaagcccgctccttgacaactggagagacaggttacattcccagcaattatgtggctccagttgactctatccaggcagaagagtggtactttggaaaacttggccgaaaagatgctgagcgacagctattgtcctttggaaacccaagaggtacctttcttatccgcgagagtgaaaccaccaaaggtgcctattcactttctatccgtgattgggatgatatgaaaggagaccatgtcaaacattataaaattcgcaaacttgacaatggtggatactacattaccacccgggcccagtttgaaacacttcagcagcttgtacaacattactcagagaaagctgatggtttgtgttttaacttaactgtgattgcatcgagttgtaccccacaaacttctggattggctaaagatgcttgggaagttgcacgtcgttcgttgtgtctggagaagaagctgggtcaggggtgtttcgctgaagtgtggcttggtacctggaatggaaacacaaaagtagccataaagactcttaaaccaggcacaatgtcccccgaatcattccttgaggaagcgcagatcatgaagaagctgaagcacgacaagctggtccagctctatgcagtggtgtctgaggagcccatctacatcgtcaccgagtatatgaacaaaggaagtttactggatttcttaaaagatggagaaggaagagctctgaaattaccaaatcttgtggacatggcagcacaggtggctgcaggaatggcttacatcgagcgcatgaattatatccatagagatctgcgatcagcaaacattctagtggggaatggactcatatgcaagattgctgacttcggattggcccgattgatagaagacaatgagtacacagcaagacaaggtgcaaagttccccatcaagtggacggcccccgaggcagccctgtacgggaggttcacaatcaagtctgacgtgtggtcttttggaatcttactcacagagctggtcaccaaaggaagagtgccatacccaggcatgaacaaccgggaggtgctggagcaggtggagcgaggctacaggatgccctgcccgcaggactgccccatctctctgcatgagctcatgatccactgctggaaaaaggaccctgaagaacgccccacttttgagtacttgcagagcttcctggaagactactttaccgcgacagagccccagtaccaacctggtgaaaacctgtaaggcccgggtctgcggagagaggccttgtcccagaggctgccccacccctccccattagctttcaattccgtagccagctgctccccagcagcggaaccgcccaggatcagattgcatgtgactctgaagctgacgaacttccatggccctcattaatgacacttgtccccaaatccgaacctcctctgtgaagcattcgagacagaaccttgttatttctcagactttggaaaatgcattgtatcgatgttatgtaaaaggccaaacctctgttcagtgtaaatagttactccagtgccaacaatcctagtgctttccttttttaaaaatgcaaatcctatgtgattttaactctgtcttcacctgattcaactaaaaaaaaaaaagtattattttccaaaagtggcctctttgtctaaaacaataaaattttttttcatgttttaacaaaaaccaatcaggacaggtgtttgtttttgttttcttttttataaatatgaatatatataatatatatgtccctgtacatatacaatgtgggtgctaatgtggagactgtggccggcctgagccaccaagctgcgggacccagagggaggattttactgcaagtcagcatcaaagcaccggtgttattctgaaaacaccagtggcctcatttttggcttttgcaaagcatgaattttttcatttggattgcactttcctggttcatgactgtacctgtaggtggttgttactttgactcttttcaggaaccaccccccaagctgaatttacaagttctgttagcactatttgcttcaacttactgcgatttgttctcaaaacttaaaaataagcaagcaaatggctgatactaccaagagaactggaagatggataccacacaaacttcttgtataaaaatatgaatgctgaaatgtttcagacatttttaatttaataaacctgtaaccacatttaagtgatctaaaacccatagcattgtagtcatggcaacccgctaaactttctcatgcaactaaaatttctgggggaaatgagggtgggggttgtacatttcccattgtaaaataagtgttttaaatgtcctgtactgctaacgaatgactttctatatgtccaggagttctccagtggaataactatgcactactttacatttcatggggatgcacaaaaacaaaaaagtattacatttttagttgctgtttgtaccaaccttaaattacatatgtttaacaacaacaaatcaaaaatcctatttctattgagtttttaatactgactagcaactctgaagtcttaattccttttttgttatgatttatttgtgagtttacatttttaaattgtttaactttcttaatttagtaattaaaaagagagcattttacatttgaa

SEQ ID NO: 39 - DNA, 2959 bp, Homo sapiens
aaatgatcaagtgttgggtataagccaaggagctgagagagggggagaccagcgcaggtctgaggagctgagaagggaggcttacgtgaagggaatttagataatgggctgtgtgcaatgtaaggataaagaagcaacaaaactgacggaggagagggacggcagcctgaaccagagctctgggtaccgctatggcacagaccccacccctcagcactaccccagcttcggtgtgacctccatccccaactacaacaacttccacgcagccgggggccaaggactcaccgtctttggaggtgtgaactcttcgtctcatacggggaccttgcgtacgagaggaggaacaggagtgacactctttgtggccctttatgactatgaagcacggacagaagatgacctgagttttcacaaaggagaaaaatttcaaatattgaacagctcggaaggagattggtgggaagcccgctccttgacaactggagagacaggttacattcccagcaattatgtggctccagttgactctatccaggcagaagagtggtactttggaaaacttggccgaaaagatgctgagcgacagctattgtcctttggaaacccaagaggtacctttcttatccgcgagagtgaaaccaccaaaggtgcctattcactttctatccgtgattgggatgatatgaaaggagaccatgtcaaacattataaaattcgcaaacttgacaatggtggatactacattaccacccgggcccagtttgaaacacttcagcagcttgtacaacattactcaggtacctggaatggaaacacaaaagtagccataaagactcttaaaccaggcacaatgtcccccgaatcattccttgaggaagcgcagatcatgaagaagctgaagcacgacaagctggtccagctctatgcagtggtgtctgaggagcccatctacatcgtcaccgagtatatgaacaaaggaagtttactggatttcttaaaagatggagaaggaagagctctgaaattaccaaatcttgtggacatggcagcacaggtggctgcaggaatggcttacatcgagcgcatgaattatatccatagagatctgcgatcagcaaacattctagtggggaatggactcatatgcaagattgctgacttcggattggcccgattgatagaagacaatgagtacacagcaagacaaggtgcaaagttccccatcaagtggacggcccccgaggcagccctgtacgggaggttcacaatcaagtctgacgtgtggtcttttggaatcttactcacagagctggtcaccaaaggaagagtgccatacccaggcatgaacaaccgggaggtgctggagcaggtggagcgaggctacaggatgccctgcccgcaggactgccccatctctctgcatgagctcatgatccactgctggaaaaaggaccctgaagaacgccccacttttgagtacttgcagagcttcctggaagactactttaccgcgacagagccccagtaccaacctggtgaaaacctgtaaggcccgggtctgcggagagaggccttgtcccagaggctgccccacccctccccattagctttcaattccgtagccagctgctccccagcagcggaaccgcccaggatcagattgcatgtgactctgaagctgacgaacttccatggccctcattaatgacacttgtccccaaatccgaacctcctctgtgaagcattcgagacagaaccttgttatttctcagactttggaaaatgcattgtatcgatgttatgtaaaaggccaaacctctgttcagtgtaaatagttactccagtgccaacaatcctagtgctttccttttttaaaaatgcaaatcctatgtgattttaactctgtcttcacctgattcaactaaaaaaaaaaaagtattattttccaaaagtggcctctttgtctaaaacaataaaattttttttcatgttttaacaaaaaccaatcaggacaggtgtttgtttttgttttcttttttataaatatgaatatatataatatatatgtccctgtacatatacaatgtgggtgctaatgtggagactgtggccggcctgagccaccaagctgcgggacccagagggaggattttactgcaagtcagcatcaaagcaccggtgttattctgaaaacaccagtggcctcatttttggcttttgcaaagcatgaattttttcatttggattgcactttcctggttcatgactgtacctgtaggtggttgttactttgactcttttcaggaaccaccccccaagctgaatttacaagttctgttagcactatttgcttcaacttactgcgatttgttctcaaaacttaaaaataagcaagcaaatggctgatactaccaagagaactggaagatggataccacacaaacttcttgtataaaaatatgaatgctgaaatgtttcagacatttttaatttaataaacctgtaaccacatttaagtgatctaaaacccatagcattgtagtcatggcaacccgctaaactttctcatgcaactaaaatttctgggggaaatgagggtgggggttgtacatttcccattgtaaaataagtgttttaaatgtcctgtactgctaacgaatgactttctatatgtccaggagttctccagtggaataactatgcactactttacatttcatggggatgcacaaaaacaaaaaagtattacatttttagttgctgtttgtaccaaccttaaattacatatgtttaacaacaacaaatcaaaaatcctatttctattgagtttttaatactgactagcaactctgaagtcttaattccttttttgttatgatttatttgtgagtttacatttttaaattgtttaactttcttaatttagtaattaaaaagagagcattttacatttgaa

SEQ ID NO: 40 - protein, 537 aa, Homo sapiens
MGCVQCKDKEATKLTEERDGSLNQSSGYRYGTDPTPQHYPSFGVTSIPNYNNFHAAGGQGLTVFGGVNSSSHTGTLRTRGGTGVTLFVALYDYEARTEDDLSFHKGEKFQILNSSEGDWWEARSLTTGETGYIPSNYVAPVDSIQAEEWYFGKLGRKDAERQLLSFGNPRGTFLIRESETTKGAYSLSIRDWDDMKGDHVKHYKIRKLDNGGYYITTRAQFETLQQLVQHYSERAAGLCCRLVVPCHKGMPRLTDLSVKTKDVWEIPRESLQLIKRLGNGQFGEVWMGTWNGNTKVAIKTLKPGTMSPESFLEEAQIMKKLKHDKLVQLYAVVSEEPIYIVTEYMNKGSLLDFLKDGEGRALKLPNLVDMAAQVAAGMAYIERMNYIHRDLRSANILVGNGLICKIADFGLARLIEDNEYTARQGAKFPIKWTAPEAALYGRFTIKSDVWSFGILLTELVTKGRVPYPGMNNREVLEQVERGYRMPCPQDCPISLHELMIHCWKKDPEERPTFEYLQSFLEDYFTATEPQYQPGENL

SEQ ID NO: 41 - protein, 534 aa, Homo sapiens
MGCVQCKDKEATKLTEERDGSLNQSSGYRYGTDPTPQHYPSFGVTSIPNYNNFHAAGGQGLTVFGGVNSSSHTGTLRTRGGTGVTLFVALYDYEARTEDDLSFHKGEKFQILNSSEGDWWEARSLTTGETGYIPSNYVAPVDSIQAEEWYFGKLGRKDAERQLLSFGNPRGTFLIRESETTKGAYSLSIRDWDDMKGDHVKHYKIRKLDNGGYYITTRAQFETLQQLVQHYSEKADGLCFNLTVIASSCTPQTSGLAKDAWEVARRSLCLEKKLGQGCFAEVWLGTWNGNTKVAIKTLKPGTMSPESFLEEAQIMKKLKHDKLVQLYAVVSEEPIYIVTEYMNKGSLLDFLKDGEGRALKLPNLVDMAAQVAAGMAYIERMNYIHRDLRSANILVGNGLICKIADFGLARLIEDNEYTARQGAKFPIKWTAPEAALYGRFTIKSDVWSFGILLTELVTKGRVPYPGMNNREVLEQVERGYRMPCPQDCPISLHELMIHCWKKDPEERPTFEYLQSFLEDYFTATEPQYQPGENL

SEQ ID NO: 42 - protein, 482 aa, Homo sapiens
MGCVQCKDKEATKLTEERDGSLNQSSGYRYGTDPTPQHYPSFGVTSIPNYNNFHAAGGQGLTVFGGVNSSSHTGTLRTRGGTGVTLFVALYDYEARTEDDLSFHKGEKFQILNSSEGDWWEARSLTTGETGYIPSNYVAPVDSIQAEEWYFGKLGRKDAERQLLSFGNPRGTFLIRESETTKGAYSLSIRDWDDMKGDHVKHYKIRKLDNGGYYITTRAQFETLQQLVQHYSGTWNGNTKVAIKTLKPGTMSPESFLEEAQIMKKLKHDKLVQLYAVVSEEPIYIVTEYMNKGSLLDFLKDGEGRALKLPNLVDMAAQVAAGMAYIERMNYIHRDLRSANILVGNGLICKIADFGLARLIEDNEYTARQGAKFPIKWTAPEAALYGRFTIKSDVWSFGILLTELVTKGRVPYPGMNNREVLEQVERGYRMPCPQDCPISLHELMIHCWKKDPEERPTFEYLQSFLEDYFTATEPQYQPGENL

SEQ ID NO: 43 - DNA, 2750 bp, Homo sapiens
attgtttcctactccattttctctggggcaatagcagaataggagcaagccagcactagtcagctaactaagtgactcaaccaaggccttttttccttgttatctttgcagatacttcattttcttagcgtttctggagattacaacatcctgcggttccgtttctgggaactttactgatttatctcccccctcacacaaataagcattgattcctgcatttctgaagatctcaagatctggactactgttgaaaaaatttccagtgaggctcacttatgtctgtaaagatgggaaaaaaatacaagaacattgttctactaaaaggattagaggtcatcaatgattatcattttagaatggttaagtccttactgagcaacgatttaaaacttaatttaaaaatgagagaagagtatgacaaaattcagattgctgacttgatggaagaaaagttccgaggtgatgctggtttgggcaaactaataaaaattttcgaagatataccaacgcttgaagacctggctgaaactcttaaaaaagaaaagttaaaagtaaaaggaccagccctatcaagaaagaggaagaaggaagtggatgctacttcacctgcaccctccacaagcagcactgtcaaaactgaaggagcagaggcaactcctggagctcagaaaagaaaaaaatcaaccaaagaaaaggctggacccaaagggagtaaggtgtccgaggaacagactcagcctccctctcctgcaggagccggcatgtccacagccatgggccgttccccatctcccaagacctcattgtcagctccacccaacagttcttcaactgagaacccgaaaacagtggccaaatgtcaggtaactcccagaagaaatgttctccaaaaacgcccagtgatagtgaaggtactgagtacaacaaagccatttgaatatgagaccccagaaatggagaaaaaaataatgtttcatgctacagtggctacacagacacagttcttccatgtgaaggttttaaacaccagcttgaaggagaaattcaatggaaagaaaatcatcatcatatcagattatttggaatatgatagtctcctagaggtcaatgaagaatctactgtatctgaagctggtcctaaccaaacgtttgaggttccaaataaaatcatcaacagagcaaaggaaactctgaagattgatattcttcacaaacaagcttcaggaaatattgtatatggggtatttatgctacataagaaaacagtaaatcagaagaccacaatctacgaaattcaggatgatagaggaaaaatggatgtagtggggacaggacaatgtcacaatatcccctgtgaagaaggagataagctccaacttttctgctttcgacttagaaaaaagaaccagatgtcaaaactgatttcagaaatgcatagttttatccagataaagaaaaaaacaaacccgagaaacaatgaccccaagagcatgaagctaccccaggaacagcgtcagcttccatatccttcagaggccagcacaaccttccctgagagccatcttcggactcctcagatgccaccaacaactccatccagcagtttcttcaccaagaaaagtgaagacacaatctccaaaatgaatgacttcatgaggatgcagatactgaaggaagggagtcattttccaggaccgttcatgaccagcataggcccagctgagagccatccccacactcctcagatgcctccatcaacaccaagcagcagtttcttaaccacgttgaaaccaagactgaagactgaacctgaagaagtttccatagaagacagtgcccagagtgacctcaaagaagtgatggtgctgaacgcaacagaatcatttgtatatgagcccaaagagcagaagaaaatgtttcatgccacagtggcaactgagaatgaagtcttccgagtgaaggtttttaatattgacctaaaggagaagttcaccccaaagaagatcattgccatagcaaattatgtttgccgcaatgggttcctggaggtatatcctttcacacttgtggctgatgtgaatgctgaccgaaacatggagatcccaaaaggattgattagaagtgccagcgtaactcctaaaatcaatcagctttgctcacaaactaaaggaagttttgtgaatggggtgtttgaggtacataagaaaaatgtaaggggtgaattcacttattatgaaatacaagataatacagggaagatggaagtggtggtgcatggacgactgaccacaatcaactgtgaggaaggagataaactgaaactcacctgctttgaattggcaccgaaaagtgggaataccggggagttgagatctgtaattcatagtcacatcaaggtcatcaagaccaggaaaaacaagaaagacatactcaatcctgattcaagtatggaaacttcaccagactttttcttctaaaatctggatgtcattgacgataatgtttatggagataaggtctaagtgcctaaaaaaatgtacatatacctggttgaaatacaacactatacatacacaccaccatatatactagctgttaatcctatggaatggggtattgggagtgcttttttaatttttcatagtttttttttaataaaatggcatattttgcatctacaacttctataatttgaaaaaataaataaacattatcttttttgtgaaaggaaaaaaaaaaaaaaaaaa

SEQ ID NO: 44 - protein, 729 aa, Homo sapiens
MGKKYKNIVLLKGLEVINDYHFRMVKSLLSNDLKLNLKMREEYDKIQIADLMEEKFRGDAGLGKLIKIFEDIPTLEDLAETLKKEKLKVKGPALSRKRKKEVDATSPAPSTSSTVKTEGAEATPGAQKRKKSTKEKAGPKGSKVSEEQTQPPSPAGAGMSTAMGRSPSPKTSLSAPPNSSSTENPKTVAKCQVTPRRNVLQKRPVIVKVLSTTKPFEYETPEMEKKIMFHATVATQTQFFHVKVLNTSLKEKFNGKKIIIISDYLEYDSLLEVNEESTVSEAGPNQTFEVPNKIINRAKETLKIDILHKQASGNIVYGVFMLHKKTVNQKTTIYEIQDDRGKMDVVGTGQCHNIPCEEGDKLQLFCFRLRKKNQMSKLISEMHSFIQIKKKTNPRNNDPKSMKLPQEQRQLPYPSEASTTFPESHLRTPQMPPTTPSSSFFTKKSEDTISKMNDFMRMQILKEGSHFPGPFMTSIGPAESHPHTPQMPPSTPSSSFLTTLKPRLKTEPEEVSIEDSAQSDLKEVMVLNATESFVYEPKEQKKMFHATVATENEVFRVKVFNIDLKEKFTPKKIIAIANYVCRNGFLEVYPFTLVADVNADRNMEIPKGLIRSASVTPKINQLCSQTKGSFVNGVFEVHKKNVRGEFTYYEIQDNTGKMEVVVHGRLTTINCEEGDKLKLTCFELAPKSGNTGELRSVIHSHIKVIKTRKNKKDILNPDSSMETSPDFFF

SEQ ID NO: 45 - DNA, 3617 bp, Homo sapiens
atcgaaacagaaaccaaagtcaggcaaactctgtaagaactgcctgacagaaagctggactcaaagctcctacccgagtgtgcagcaggatcgccccggtccgggaccccaggcgcacaccgcagagtccaaagtgccgcgcctgccggccgcacctgcctgccgcggccccgcgcgccgccccgctgcccacctgcccgcctgcccacctgcccaggtgcgagtgcagccccgcgcgccggcctgagagccctgtggacaacctcgtcattgtcaggcacagagcggtagaccctgcttctctaagtgggcagcggacagcggcacgcacatttcacctgtcccgcagacaacagcaccatctgcttgggagaaccctctcccttctctgagaaagaaagatgtcgaatgggtattccacagacgagaatttccgctatctcatctcgtgcttcagggccagggtgaaaatgtacatccaggtggagcctgtgctggactacctgacctttctgcctgcagaggtgaaggagcagattcagaggacagtcgccacctccgggaacatgcaggcagttgaactgctgctgagcaccttggagaagggagtctggcaccttggttggactcgggaattcgtggaggccctccggagaaccggcagccctctggccgcccgctacatgaaccctgagctcacggacttgccctctccatcgtttgagaacgctcatgatgaatatctccaactgctgaacctccttcagcccactctggtggacaagcttctagttagagacgtcttggataagtgcatggaggaggaactgttgacaattgaagacagaaaccggattgctgctgcagaaaacaatggaaatgaatcaggtgtaagagagctactaaaaaggattgtgcagaaagaaaactggttctctgcatttctgaatgttcttcgtcaaacaggaaacaatgaacttgtccaagagttaacaggctctgattgctcagaaagcaatgcagagattgagaatttatcacaagttgatggtcctcaagtggaagagcaacttctttcaaccacagttcagccaaatctggagaaggaggtctggggcatggagaataactcatcagaatcatcttttgcagattcttctgtagtttcagaatcagacacaagtttggcagaaggaagtgtcagctgcttagatgaaagtcttggacataacagcaacatgggcagtgattcaggcaccatgggaagtgattcagatgaagagaatgtggcagcaagagcatccccggagccagaactccagctcaggccttaccaaatggaagttgcccagccagccttggaagggaagaatatcatcatctgcctccctacagggagtggaaaaaccagagtggctgtttacattgccaaggatcacttagacaagaagaaaaaagcatctgagcctggaaaagttatagttcttgtcaataaggtactgctagttgaacagctcttccgcaaggagttccaaccatttttgaagaaatggtatcgtgttattggattaagtggtgatacccaactgaaaatatcatttccagaagttgtcaagtcctgtgatattattatcagtacagctcaaatccttgaaaactccctcttaaacttggaaaatggagaagatgctggtgttcaattgtcagacttttccctcattatcattgatgaatgtcatcacaccaacaaagaagcagtgtataataacatcatgaggcattatttgatgcagaagttgaaaaacaatagactcaagaaagaaaacaaaccagtgattccccttcctcagatactgggactaacagcttcacctggtgttggaggggccacgaagcaagccaaagctgaagaacacattttaaaactatgtgccaatcttgatgcatttactattaaaactgttaaagaaaaccttgatcaactgaaaaaccaaatacaggagccatgcaagaagtttgccattgcagatgcaaccagagaagatccatttaaagagaaacttctagaaataatgacaaggattcaaacttattgtcaaatgagtccaatgtcagattttggaactcaaccctatgaacaatgggccattcaaatggaaaaaaaagctgcaaaagaaggaaatcgcaaagaacgtgtttgtgcagaacatttgaggaagtacaatgaggccctacaaattaatgacacaattcgaatgatagatgcgtatactcatcttgaaactttctataatgaagagaaagataagaagtttgcagtcatagaagatgatagtgatgagggtggtgatgatgagtattgtgatggtgatgaagatgaggatgatttaaagaaacctttgaaactggatgaaacagatagatttctcatgactttattttttgaaaacaataaaatgttgaaaaggctggctgaaaacccagaatatgaaaatgaaaagctgaccaaattaagaaataccataatggagcaatatactaggactgaggaatcagcacgaggaataatctttacaaaaacacgacagagtgcatatgcgctttcccagtggattactgaaaatgaaaaatttgctgaagtaggagtcaaagcccaccatctgattggagctggacacagcagtgagttcaaacccatgacacagaatgaacaaaaagaagtcattagtaaatttcgcactggaaaaataaatctgcttatcgctaccacagtggcagaagaaggtctggatattaaagaatgtaacattgttatccgttatggtctcgtcaccaatgaaatagccatggtccaggcccgtggtcgagccagagctgatgagagcacctacgtcctggttgctcacagtggttcaggagttatcgaacatgagacagttaatgatttccgagagaagatgatgtataaagctatacattgtgttcaaaatatgaaaccagaggagtatgctcataagattttggaattacagatgcaaagtataatggaaaagaaaatgaaaaccaagagaaatattgccaagcattacaagaataacccatcactaataactttcctttgcaaaaactgcagtgtgctagcctgttctggggaagatatccatgtaattgagaaaatgcatcacgtcaatatgaccccagaattcaaggaactttacattgtaagagaaaacaaagcactgcaaaagaagtgtgccgactatcaaataaatggtgaaatcatctgcaaatgtggccaggcttggggaacaatgatggtgcacaaaggcttagatttgccttgtctcaaaataaggaattttgtagtggttttcaaaaataattcaacaaagaaacaatacaaaaagtgggtagaattacctatcacatttcccaatcttgactattcagaatgctgtttatttagtgatgaggattagcacttgattgaagattcttttaaaatactatcagttaaacatttaatatgattatgattaatgtattcattatgctacagaactgacataagaatcaataaaatgattgttttactctgcaaaaaaaaaaaaaaaaaa

SEQ ID NO: 46 - protein, 1025 aa, Homo sapiens
MSNGYSTDENFRYLISCFRARVKMYIQVEPVLDYLTFLPAEVKEQIQRTVATSGNMQAVELLLSTLEKGVWHLGWTREFVEALRRTGSPLAARYMNPELTDLPSPSFENAHDEYLQLLNLLQPTLVDKLLVRDVLDKCMEEELLTIEDRNRIAAAENNGNESGVRELLKRIVQKENWFSAFLNVLRQTGNNELVQELTGSDCSESNAEIENLSQVDGPQVEEQLLSTTVQPNLEKEVWGMENNSSESSFADSSVVSESDTSLAEGSVSCLDESLGHNSNMGSDSGTMGSDSDEENVAARASPEPELQLRPYQMEVAQPALEGKNIIICLPTGSGKTRVAVYIAKDHLDKKKKASEPGKVIVLVNKVLLVEQLFRKEFQPFLKKWYRVIGLSGDTQLKISFPEVVKSCDIIISTAQILENSLLNLENGEDAGVQLSDFSLIIIDECHHTNKEAVYNNIMRHYLMQKLKNNRLKKENKPVIPLPQILGLTASPGVGGATKQAKAEEHILKLCANLDAFTIKTVKENLDQLKNQIQEPCKKFAIADATREDPFKEKLLEIMTRIQTYCQMSPMSDFGTQPYEQWAIQMEKKAAKEGNRKERVCAEHLRKYNEALQINDTIRMIDAYTHLETFYNEEKDKKFAVIEDDSDEGGDDEYCDGDEDEDDLKKPLKLDETDRFLMTLFFENNKMLKRLAENPEYENEKLTKLRNTIMEQYTRTEESARGIIFTKTRQSAYALSQWITENEKFAEVGVKAHHLIGAGHSSEFKPMTQNEQKEVISKFRTGKINLLIATTVAEEGLDIKECNIVIRYGLVTNEIAMVQARGRARADESTYVLVAHSGSGVIEHETVNDFREKMMYKAIHCVQNMKPEEYAHKILELQMQSIMEKKMKTKRNIAKHYKNNPSLITFLCKNCSVLACSGEDIHVIEKMHHVNMTPEFKELYIVRENKALQKKCADYQINGEIICKCGQAWGTMMVHKGLDLPCLKIRNFVVVFKNNSTKKQYKKWVELPITFPNLDYSECCLFSDED

SEQ ID NO: 47 - DNA, 4411 bp, Homo sapiens
aactgaaaatccacaagacagaatagccagatctcagaggagcctggctaagcaaaaccctgcagaacggctgcctaatttacagcaaccatgaggccacttaaggatgcagcaagaaggagccatctgcaatccaggaagaaattccttgccaggaaccaaattggttgtcaccttcatctaggacttctagcctcgagaacttacaaatggtgatgatcatcaggtcaaggatagtctggagcaattgagatgtcactttacatgggagttatccattgatgacgatgaaatgcctgatttagaaaacagagtcttggatcagattgaattcctagacaccaaatacagtgtgggaatacacaacctactagcctatgtgaaacacctgaaaggccagaatgaggaagccctgaagagcttaaaagaagctgaaaacttaatgcaggaagaacatgacaaccaagcaaatgtgaggagtctggtgacctggggcaactttgcctggatgtattaccacatgggcagactggcagaagcccagacttacctggacaaggtggagaacatttgcaagaagctttcaaatcccttccgctatagaatggagtgtccagaaatagactgtgaggaaggatgggccttgctgaagtgtggaggaaaaaattatgaacgggccaaggcctgctttgaaaaggtgcttgaagtggaccctgaaaaccctgaatccagcgctgggtatgcgatctctgcctatcgcctggatggctttaaattagccacaaaaaatcacaagccattttctttgcttcccctaaggcaggctgtccgcttaaatccagacaatggatatattaaggttctccttgccctgaagcttcaggatgaaggacaggaagctgaaggagaaaagtacattgaagaagctctagccaacatgtcctcacagacctatgtctttcgatatgcagccaagttttaccgaagaaaaggctctgtggataaagctcttgagttattaaaaaaggccttgcaggaaacacccacttctgtcttactgcatcaccagatagggctttgctacaaggcacaaatgatccaaatcaaggaggctacaaaagggcagcctagagggcagaacagagaaaagctagacaaaatgataagatcagccatatttcattttgaatctgcagtggaaaaaaagcccacatttgaggtggctcatctagacctggcaagaatgtatatagaagcaggcaatcacagaaaagctgaagagaattttcaaaaattgttatgcatgaaaccagtggtagaagaaacaatgcaagacatacatttccactatggtcggtttcaggaatttcaaaagaaatctgacgtcaatgcaattatccattatttaaaagctataaaaatagaacaggcatcattaacaagggataaaagtatcaattctttgaagaaattggttttaaggaaacttcggagaaaggcattagatctggaaagcttgagcctccttgggttcgtctacaaattggaaggaaatatgaatgaagccctggagtactatgagcgggccctgagactggctgctgactttgagaactctgtgagacaaggtccttaggcacccagatatcagccactttcacatttcatttcattttatgctaacatttactaatcatcttttctgcttactgttttcagaaacattataattcactgtaatgatgtaattcttgaataataaatctgacaaaatattagttgtgttcaacaattagtgaaacagaatgtgtgtatgcatgtaagaaagagaaatcatttgtatgagtgctatgtagtagagaaaaaatgttagttaactttgtaggaaataaaacattggacttacactaaatgtttaattcattcattttattgtgaaataaaaataaaatccttagctcctccaccaactgaacagaccctcttggccaaggagaccccagaaaccttaaaaactaagtttcccaaccatgacaagatgagagatcattcacacctcattatattccctcccttgctaactgccattggactttttccactgagttaaacagaaacccatggaaaacaaagaacagaagactcactccttggctgacttcacctagctcactccacgtagcgccacagccagactcccctcccctcttgcggtttccacatgacaactgatcagccttccctcctgataagtgaccactgcccacagactggttctggccagtccatggaggctgcacacagggtgcctctatgtcctttgtttcaccttttgatatagaaaggctaattttgctgtattttaatgttaagtctccaccacagagtgaacacagaatgcatgtgacatacatgtttacataccactattgtgtgactgcccctcatgaatattcatagccccccataacctgttaactatgtgtgtctagccaatccaccaaccataaaacttctgtaataccctcccttcctccaagagcctgcttttggttgctgtggtaggctctgcttcccaggctgcaggttgcaggagaggaggctgcagtggctcacgcctgtaatctcagcacttcgatgggacgaggcaggcagatcacctgaacccaggagttcgagagcagccttggcaatggcaaaaccaaccgtctctacaaaaaatgcaaaaacttagctgggtgtggtggcatgcacctgtagcttcagttccagctactcaggaggctgaggtgagtggactgctggagccagggagttcgaggctgcagtgtcgagatcttgccactgcactccattctggatgatagaacgagaccccatctcaaaaaaaaaaaaagttctctccaattgtatatagcttgtgattttatgtcaacactatcaataaatagctttcagtgcaagaaaccaaaaatactgtaataaacaggcacatattcttcccaaacctcatgcagtttacaatctagtgagagacacagatagcagtacagagtcaattaaaggttagttttcttcatgaagatgttttaattttaattcaatgtgaaagggttccaaggagtttatcttgttttatgccattttatttgaagcactacttactaagtcatttgctgatattaatctagttaaatcaagaaatattacatgaaaatgttgctaaatcagagatcatgggtaacaatcacctttgattatgaataatcatattttattgaaaggcaaggcacaacaaataataagaaggaaaaaataaataagcaatgttattgatctttcattctgtatatgttttggggggaatatactagtttcttttagtggctgtaacaaattaccacaaacttggtgacttaaaatttcacagatttactctttcttacagttctggaggtcagaagtctgaaatgggtttcaatgagccaaagtcaaggtattgatgacgctacactcctccggaggctctaggcagatagccttttccagcttccagaggctgcctgaattctttcatccatcttaaaaaccaacagtgtagtagcctcaaatctctctctctgcttccttcttcacatctccttctctcctctgactcttttgcctctttcttctaaggacgcaccaggtccacctgcataatccagaataattgccccatccgcaaatccttaatttaataacatctgcaaagtcccttttgctatgtaaagtagcatgttcacaggttctggagacttggccatggatacgattgcggggggggcattattcttaccacagagcaccccaagaaaatctccaaattttgggcttccaatccattttgcttcaattatttaatatttttactccttccagtagatactgatttcatccattgcccttaagaaggtaggacagagattatggcacatctcacattaaatgctatattttcgttggaaatacattttttgcttcaacttttattttaaattcaagggtacatgtgcaggatgttcaggtttgttacacaggtaaacgtgtgccatggcggtttgctgaacagatcatcccatcaccaacagatcatcccattgagaggtgaagccggctgggcttctgggttgggtggggacttggagaacttttctgtctagctaaagtattgtaaaatggaccagtcaacactctgtaaaatggaccaatcagctctctgtaaaatggaccaatcagcaggatgtgggtggggccaagtaagggaataaaagcaggccacccgagctggcagcggcaacccgctcgggtccccttccatgctgtggaagttttgttctttcgctctttcaataaatcttgctgctgctca

SEQ ID NO: 48 - DNA, 4302 bp, Homo sapiens
aactgaaaatccacaagacagaatagccagatctcagaggagcctggctaagcaaaaccctgcagaacggctgcctaatttacagcaaccatgagtacaaatggtgatgatcatcaggtcaaggatagtctggagcaattgagatgtcactttacatgggagttatccattgatgacgatgaaatgcctgatttagaaaacagagtcttggatcagattgaattcctagacaccaaatacagtgtgggaatacacaacctactagcctatgtgaaacacctgaaaggccagaatgaggaagccctgaagagcttaaaagaagctgaaaacttaatgcaggaagaacatgacaaccaagcaaatgtgaggagtctggtgacctggggcaactttgcctggatgtattaccacatgggcagactggcagaagcccagacttacctggacaaggtggagaacatttgcaagaagctttcaaatcccttccgctatagaatggagtgtccagaaatagactgtgaggaaggatgggccttgctgaagtgtggaggaaaaaattatgaacgggccaaggcctgctttgaaaaggtgcttgaagtggaccctgaaaaccctgaatccagcgctgggtatgcgatctctgcctatcgcctggatggctttaaattagccacaaaaaatcacaagccattttctttgcttcccctaaggcaggctgtccgcttaaatccagacaatggatatattaaggttctccttgccctgaagcttcaggatgaaggacaggaagctgaaggagaaaagtacattgaagaagctctagccaacatgtcctcacagacctatgtctttcgatatgcagccaagttttaccgaagaaaaggctctgtggataaagctcttgagttattaaaaaaggccttgcaggaaacacccacttctgtcttactgcatcaccagatagggctttgctacaaggcacaaatgatccaaatcaaggaggctacaaaagggcagcctagagggcagaacagagaaaagctagacaaaatgataagatcagccatatttcattttgaatctgcagtggaaaaaaagcccacatttgaggtggctcatctagacctggcaagaatgtatatagaagcaggcaatcacagaaaagctgaagagaattttcaaaaattgttatgcatgaaaccagtggtagaagaaacaatgcaagacatacatttccactatggtcggtttcaggaatttcaaaagaaatctgacgtcaatgcaattatccattatttaaaagctataaaaatagaacaggcatcattaacaagggataaaagtatcaattctttgaagaaattggttttaaggaaacttcggagaaaggcattagatctggaaagcttgagcctccttgggttcgtctacaaattggaaggaaatatgaatgaagccctggagtactatgagcgggccctgagactggctgctgactttgagaactctgtgagacaaggtccttaggcacccagatatcagccactttcacatttcatttcattttatgctaacatttactaatcatcttttctgcttactgttttcagaaacattataattcactgtaatgatgtaattcttgaataataaatctgacaaaatattagttgtgttcaacaattagtgaaacagaatgtgtgtatgcatgtaagaaagagaaatcatttgtatgagtgctatgtagtagagaaaaaatgttagttaactttgtaggaaataaaacattggacttacactaaatgtttaattcattcattttattgtgaaataaaaataaaatccttagctcctccaccaactgaacagaccctcttggccaaggagaccccagaaaccttaaaaactaagtttcccaaccatgacaagatgagagatcattcacacctcattatattccctcccttgctaactgccattggactttttccactgagttaaacagaaacccatggaaaacaaagaacagaagactcactccttggctgacttcacctagctcactccacgtagcgccacagccagactcccctcccctcttgcggtttccacatgacaactgatcagccttccctcctgataagtgaccactgcccacagactggttctggccagtccatggaggctgcacacagggtgcctctatgtcctttgtttcaccttttgatatagaaaggctaattttgctgtattttaatgttaagtctccaccacagagtgaacacagaatgcatgtgacatacatgtttacataccactattgtgtgactgcccctcatgaatattcatagccccccataacctgttaactatgtgtgtctagccaatccaccaaccataaaacttctgtaataccctcccttcctccaagagcctgcttttggttgctgtggtaggctctgcttcccaggctgcaggttgcaggagaggaggctgcagtggctcacgcctgtaatctcagcacttcgatgggacgaggcaggcagatcacctgaacccaggagttcgagagcagccttggcaatggcaaaaccaaccgtctctacaaaaaatgcaaaaacttagctgggtgtggtggcatgcacctgtagcttcagttccagctactcaggaggctgaggtgagtggactgctggagccagggagttcgaggctgcagtgtcgagatcttgccactgcactccattctggatgatagaacgagaccccatctcaaaaaaaaaaaaagttctctccaattgtatatagcttgtgattttatgtcaacactatcaataaatagctttcagtgcaagaaaccaaaaatactgtaataaacaggcacatattcttcccaaacctcatgcagtttacaatctagtgagagacacagatagcagtacagagtcaattaaaggttagttttcttcatgaagatgttttaattttaattcaatgtgaaagggttccaaggagtttatcttgttttatgccattttatttgaagcactacttactaagtcatttgctgatattaatctagttaaatcaagaaatattacatgaaaatgttgctaaatcagagatcatgggtaacaatcacctttgattatgaataatcatattttattgaaaggcaaggcacaacaaataataagaaggaaaaaataaataagcaatgttattgatctttcattctgtatatgttttggggggaatatactagtttcttttagtggctgtaacaaattaccacaaacttggtgacttaaaatttcacagatttactctttcttacagttctggaggtcagaagtctgaaatgggtttcaatgagccaaagtcaaggtattgatgacgctacactcctccggaggctctaggcagatagccttttccagcttccagaggctgcctgaattctttcatccatcttaaaaaccaacagtgtagtagcctcaaatctctctctctgcttccttcttcacatctccttctctcctctgactcttttgcctctttcttctaaggacgcaccaggtccacctgcataatccagaataattgccccatccgcaaatccttaatttaataacatctgcaaagtcccttttgctatgtaaagtagcatgttcacaggttctggagacttggccatggatacgattgcggggggggcattattcttaccacagagcaccccaagaaaatctccaaattttgggcttccaatccattttgcttcaattatttaatatttttactccttccagtagatactgatttcatccattgcccttaagaaggtaggacagagattatggcacatctcacattaaatgctatattttcgttggaaatacattttttgcttcaacttttattttaaattcaagggtacatgtgcaggatgttcaggtttgttacacaggtaaacgtgtgccatggcggtttgctgaacagatcatcccatcaccaacagatcatcccattgagaggtgaagccggctgggcttctgggttgggtggggacttggagaacttttctgtctagctaaagtattgtaaaatggaccagtcaacactctgtaaaatggaccaatcagctctctgtaaaatggaccaatcagcaggatgtgggtggggccaagtaagggaataaaagcaggccacccgagctggcagcggcaacccgctcgggtccccttccatgctgtggaagttttgttctttcgctctttcaataaatcttgctgctgctca

SEQ ID NO: 49 - protein, 447 aa, Homo sapiens
MPDLENRVLDQIEFLDTKYSVGIHNLLAYVKHLKGQNEEALKSLKEAENLMQEEHDNQANVRSLVTWGNFAWMYYHMGRLAEAQTYLDKVENICKKLSNPFRYRMECPEIDCEEGWALLKCGGKNYERAKACFEKVLEVDPENPESSAGYAISAYRLDGFKLATKNHKPFSLLPLRQAVRLNPDNGYIKVLLALKLQDEGQEAEGEKYIEEALANMSSQTYVFRYAAKFYRRKGSVDKALELLKKALQETPTSVLLHHQIGLCYKAQMIQIKEATKGQPRGQNREKLDKMIRSAIFHFESAVEKKPTFEVAHLDLARMYIEAGNHRKAEENFQKLLCMKPVVEETMQDIHFHYGRFQEFQKKSDVNAIIHYLKAIKIEQASLTRDKSINSLKKLVLRKLRRKALDLESLSLLGFVYKLEGNMNEALEYYERALRLAADFENSVRQGP

SEQ ID NO: 50 - protein, 478 aa, Homo sapiens
MSTNGDDHQVKDSLEQLRCHFTWELSIDDDEMPDLENRVLDQIEFLDTKYSVGIHNLLAYVKHLKGQNEEALKSLKEAENLMQEEHDNQANVRSLVTWGNFAWMYYHMGRLAEAQTYLDKVENICKKLSNPFRYRMECPEIDCEEGWALLKCGGKNYERAKACFEKVLEVDPENPESSAGYAISAYRLDGFKLATKNHKPFSLLPLRQAVRLNPDNGYIKVLLALKLQDEGQEAEGEKYIEEALANMSSQTYVFRYAAKFYRRKGSVDKALELLKKALQETPTSVLLHHQIGLCYKAQMIQIKEATKGQPRGQNREKLDKMIRSAIFHFESAVEKKPTFEVAHLDLARMYIEAGNHRKAEENFQKLLCMKPVVEETMQDIHFHYGRFQEFQKKSDVNAIIHYLKAIKIEQASLTRDKSINSLKKLVLRKLRRKALDLESLSLLGFVYKLEGNMNEALEYYERALRLAADFENSVRQGP

SEQ ID NO: 51 - DNA, 2407 bp, Homo sapiens
gtggaaacctcttcagcatttgcttggaatcagtaagctaaaaacaaaatcaaccgggaccccagcttttcagaactgcagggaaacagccatcatgagtgaggtcaccaagaattccctggagaaaatccttccacagctgaaatgccatttcacctggaacttattcaaggaagacagtgtctcaagggatctagaagatagagtgtgtaaccagattgaatttttaaacactgagttcaaagctacaatgtacaacttgttggcctacataaaacacctagatggtaacaacgaggcagccctggaatgcttacggcaagctgaagagttaatccagcaagaacatgctgaccaagcagaaatcagaagtctagtcacttggggaaactacgcctgggtctactatcacttgggcagactctcagatgctcagatttatgtagataaggtgaaacaaacctgcaagaaattttcaaatccatacagtattgagtattctgaacttgactgtgaggaagggtggacacaactgaagtgtggaagaaatgaaagggcgaaggtgtgttttgagaaggctctggaagaaaagcccaacaacccagaattctcctctggactggcaattgcgatgtaccatctggataatcacccagagaaacagttctctactgatgttttgaagcaggccattgagctgagtcctgataaccaatacgtcaaggttctcttgggcctgaaactgcagaagatgaataaagaagctgaaggagagcagtttgttgaagaagccttggaaaagtctccttgccaaacagatgtcctccgcagtgcagccaaattttacagaagaaaaggtgacctagacaaagctattgaactgtttcaacgggtgttggaatccacaccaaacaatggctacctctatcaccagattgggtgctgctacaaggcaaaagtaagacaaatgcagaatacaggagaatctgaagctagtggaaataaagagatgattgaagcactaaagcaatatgctatggactattcgaataaagctcttgagaagggactgaatcctctgaatgcatactccgatctcgctgagttcctggagacggaatgttatcagacaccattcaataaggaagtccctgatgctgaaaagcaacaatcccatcagcgctactgcaaccttcagaaatataatgggaagtctgaagacactgctgtgcaacatggtttagagggtttgtccataagcaaaaaatcaactgacaaggaagagatcaaagaccaaccacagaatgtatctgaaaatctgcttccacaaaatgcaccaaattattggtatcttcaaggattaattcataagcagaatggagatctgctgcaagcagccaaatgttatgagaaggaactgggccgcctgctaagggatgccccttcaggcataggcagtattttcctgtcagcatctgagcttgaggatggtagtgaggaaatgggccagggcgcagtcagctccagtcccagagagctcctctctaactcagagcaactgaactgagacagaggaggaaaacagagcatcagaagcctgcagtggtggttgtgacgggtaggacgataggaagacagggggccccaacctgggattgctgagcagggaagctttgcatgttgctctaaggtacatttttaaagagttgttttttggccgggcgcagtggctcatgcctgtaatcccagcactttgggaggccgaggtgggcggatcacgaggtctggagtttgagaccatcctggctaacacagtgaaatcccgtctctactaaaaatacaaaaaattagccaggcgtggtggctggcacctgtagtcccagctacttgggaggctgaggcaggagaatggcgtgaacctggaaggaagaggttgcagtgagccaagattgcgcccctgcactccagcctgggcaacagagcaagactccatctcaaaaaaaaaaaaaaaaaaaaaaaagagttgttttctcatgttcattatagttcattacagttacatagtccgaaggtcttacaactaatcactggtagcaataaatgcttcaggcccacatgatgctgattagttctcagttttcattcagttcacaatataaccaccattcctgccctccctgccaagggtcataaatggtgactgcctaacaacaaaatttgcagtctcatctcattttcatccagacttctggaactcaaagattaacttttgactaaccctggaatatctcttatctcacttatagcttcaggcatgtatttatatgtattcttgatagcaataccataatcaatgtgtattcctgatagtaatgctacaataaatccaaacatttcaactctgtta

SEQ ID NO: 52 - protein, 490 aa, Homo sapiens
MSEVTKNSLEKILPQLKCHFTWNLFKEDSVSRDLEDRVCNQIEFLNTEFKATMYNLLAYIKHLDGNNEAALECLRQAEELIQQEHADQAEIRSLVTWGNYAWVYYHLGRLSDAQIYVDKVKQTCKKFSNPYSIEYSELDCEEGWTQLKCGRNERAKVCFEKALEEKPNNPEFSSGLAIAMYHLDNHPEKQFSTDVLKQAIELSPDNQYVKVLLGLKLQKMNKEAEGEQFVEEALEKSPCQTDVLRSAAKFYRRKGDLDKAIELFQRVLESTPNNGYLYHQIGCCYKAKVRQMQNTGESEASGNKEMIEALKQYAMDYSNKALEKGLNPLNAYSDLAEFLETECYQTPFNKEVPDAEKQQSHQRYCNLQKYNGKSEDTAVQHGLEGLSISKKSTDKEEIKDQPQNVSENLLPQNAPNYWYLQGLIHKQNGDLLQAAKCYEKELGRLLRDAPSGIGSIFLSASELEDGSEEMGQGAVSSSPRELLSNSEQLN

SEQ ID NO: 53 - DNA, 12379 bp, Homo sapiens
gacccgagagccgctgagccgcgaggccgggccggggcgccggccgggaatgccgggggcgcggcgccgacgccgaggcgcggccatggaggggaagccccgcgccggggtcgcgctggccccggggccgagcggccgacggccttccgcccgctgcgcccgccgccgccgcccggggctgctgcttcctggcctctggctgctgctgctggcccggccggcctcgtgcgccccagatgagctctctccggaacagcacaacctttctttatactccatggagctcgtgctgaagaaaagcactgggcacagcgctgcacaagtggccttaacagaaactgctcccggctcccagcacagcagtcctctccatgtcacagccccgccgtctgccactacttttgatacagccttttttaaccaaggaaaacagaccaaaagtacagcagatcccagcatctttgtggcaacttacgtgtcagtgacgagtaaagaggtggccgtcaatgacgatgagatggataactttctgccagatactcactggaccactccacggatggtttctccaatacagtatatcacagtcagcccaccagggctgcccagggaagcattagaacctatgctcactccatcattacccatggtttctttacaagatgaagaagtgacatcgggctggcagaacacaacgcgacaaccagcggcatatgctgagtccgccagtcatttccacacctttcggtcagcttttcgcacctctgagggcatcgttccaactcctggcaggaatttggtgctttatcctactgatgcttacagtcatttatcaagcaggactctgccagagattgtggcttccctaacagagggtgtggaaaccaccctttttttaagctcccggtctttaatgccacagccgttaggcgacggcattactataccgttgccctccttgggggaggtctcacagcctccagaggaggtttgggccacaagtgcagacagatacactgatgtgaccactgtgttgagtcaaagcctagaagaaaccatctctccaagaacataccccactgtgactgcatcgcacgcagcccttgcattcagcaggacacattctccattgctttcaactcctcttgcatttgcgtcctctgcttcaccaactgatgtttcatctaacccctttctccctagcgactccagcaaaacatccgaattgcatagcaattcagccctccccggtcctgtggacaacactcatatcctgagcccggtgtcctcattcagaccatacacttggtgtgcggcctgcactgtgccttcacctcagcaagttctggccacgagcctcatggagaaagacgtgggatcaggggatggtgccgagactctgtgcatgaccgtgctggaagaaagcagcatctctctaatgagtagcgtcgtagcagacttctctgaatttgaggaagatcctcaagtatttaatacgcttttcccctccagacctatcgtcccactttcttctagatccatggaaatctcagagacgagtgttggcatttctgccgaggtggatatgagtagtgttacaaccacacaggttccccctgcccacggccgcctctctgtgccggcgtcacttgatcctactgctggctccttgtctgttgctgaaacccaagtgacgccatccagcgtgaccactgcatttttctcggtcatcaccagcattctccttgactcatctttctctgtcatagcaaacaaaaacacaccgtcgcttgccgtcagagacccgagtgtttttacgccttatagtctggttccttcagtggagtcttcacttttctctgaccaagaacgttccagtttttctgagcataaacccagaggtgctttggattttgcatccagctttttctcaacacccccgctggaactcagcggctccatctcttcgccttcggaagcacctgcgtctctgtctctgatgccgagtgacttgtcccccttcacatctcagtctttttctcccttggttgagacatttacattgtttgactctagtgatctgcagtcatctcagctgtctcttcccagttccacaaatcttgagttttcgcagctccagccaagttccgagctgcctttaaacaccatcatgttgctacctagccgttctgaggtgtcaccatggtcaagcttcccttctgattctctcgagtttgttgaagcgtctacggtttcactgacggattcagaagctcattttacctcagctttcattgaaactacctcctatcttgagtcttcactcatttcccatgaatccgcagtcactgcactggtgccccccggctctgagtcttttgacattttgactgccgggattcaagcaacatcaccattgaccactgtccacacaacgcccattttaactgagtcttctttgttctcaactctgacacctcctgacgaccaaatcagtgctctagacggtcacgtgtctgtcctggcctctttctccaaagccattcccactggtacggtgttgatcactgacgcgtacctgccatcaggatcctcgtttgtttctgaagcaacccccttccctctgcccacagagctgaccgtcgtgggcccatcactcacacccacagaggtgccactgaacacctccacggaagtgagcacaaccagcaccggtgctgccactggtggtcccctcgactccaccctgatgggtgacgccgcaagtcagagccccccagagagtagtgctgctcctcccctgccatccctgcgtcccgtgactgccttcactctcgaagcaacagtcgacacaccaacactggctactgccaagccgccatatgtttgtgatatcacagtccccgatgcctatctgatcacaactgtgctggccagaagagctgtgcaggagtacatcattacagcaatcaaagaagtactgaggattcacttcaaccgtgcagtggaactgaaggtttacgaactatttactgacttcacttttctggtaacatccggtcctttcgtttacacggcaatatccgtcataaatgtgcttataaacagtaagcttgtccgtgaccagactcctttaatcctgtctgtgaaaccttctttccttgtgccagagtccaggttccaagttcaaacagtacttcagtttgtgcctccgagtgtggatactggcttctgcaacttcacccagcgcattgagaaaggcctaatgacagctctctttgaagtgagaaaacaccaccagggaacgtataacctcacggtgcagatcttgaatatcaccatcagttcctcaagggtgactcctcggcggggcccggtgaatatcatctttgcggttaaaagcacacagggatttttgaatgggtcggaagtgagcgagctgctcagaaacttgagtgtggtggagttcagtttctatctgggatacccagtgctgcagatcgcagagcccttccagtatccacagctcaacttatctcagttgctgaagtcctcttgggtcagaacagttctcctgggcgtcatggagaagcaactccagaatgaagtgtttcaagccgagatggaacgcaagctggcccagctgctcagcgaggtttccaccagaaggcggatgtggagaagggccactgtagctgcagggaacagtgtggtgcaggtggtaaatgtgtcgaggctggagggagatgacaatccggtacagctcatctactttgtggaggatcaagatggagaaagactcagtgcagtcaagtcttcggacctgattaacaaaatggacctccagagagcagccatcatcttgggttaccgaattcaaggtgtcattgcccagcctgtcgacagggtgaagaggccgtctccggaatcccagagcaacaacttgtgggtcattgttggcgtggtcatcccagtgctggtggtgatggtgattgttgtcatcctctactggaaactatgccgcacagacaagctagactttcagcctgacactgtggccaacattcagcagcgtcagaagctgcagatccctagtgtgaagggcttcgattttgctaagcagcatctgggtcagcacaataaagacgacatattgattattcatgagccagcgccactgccaggacctctgaaggaccacaccacgccctcggaaaatggagacgtgccaagccccaagtcaaagatcccttccaagaatgttcgtcacagaggaagagtttctccctcagatgctgactctacggtcagtgaagagtccagcgagagggacgcaggagataagacgccgggagccgtcaacgatggcaggtcccacagagctccgcagagcgggccaccactgcccagttcgggaaatgagcagcactcatcagcctccatcttcgagcacgtggacaggatctcccgccccccggaggctagccggcgggtccccagtaagatccagcttatcgccatgcagccgatcccggcacctcccgtccagcgcccctccccagccgaccgagtggcggaaagcaataaaatcaacaaagagattcagaccgcgctgcggcacaagtctgagatcgagcaccatcgcaacaagatccgcctgcgcgccaagcgccgcgggcactacgagttcccggtggtagacgacctgtcctcgggcgacactaaggagcgacaccgggtgtaccgcagggcacagatgcagatcgacaagatcctggaccccacggccagcgtgccctccgtgttcatagagcccaggaagagctcacggataaaacgttctcccaagcctcgccggaaacaccaggtcaacggctgtcctgccgacgctgagaaggaccggctcatcaccacagacagcgatggcacctacaggaggccccccggcgtccacaactcagcctacatcggatgcccatcggatcctgacctcccagccgatgtgcagacaccatcctcggtggaactggggaggtatccagcccttcccttcccggcctcccagtacatcccaccccagccgtccatcgaggaggcacgccagaccatgcactccctcctggacgacgcctttgccctcgtggcccccagcagccagcctgccagcaccgcaggtgtaggccccggagtcccacccggcctgcccgcaaacagcaccccttcccaggaagagaggcgagccacccagtgggggtccttctacagcccagcccagacggccaacaatccctgcagtagatacgaagactatggaatgactcccccgacgggtccattgccaagaccaggttttggccccggtttgctgcagtctacagagctggtgccccctgaccctcagcagccacaggcctccgccgaagccccatttgctgccagagggatctactcggaggagatgccgtcggtggcccggcctcggcctgtcgggggtaccacaggctcccagatccagcacctgacacaggtggggattgccagcagaattggagctcagccagtggaaatcccgccaagcagaggcagccagtatggggggccaggctggccttcgtacggggaggacgaagcggggcgaagagaggccgtgccaaggacttcaggcagggagccctcagctccttccgggaacctcccccaccggggactgcagggccctgggctgggttaccccaccagctccacggaagacctccagcctggccactcctcggcctctctcatcaaagcaatccgcgaggagctcctccggctctcccagaaacagagcaccgtgcagaacttccacagctgatcggcctcgcctcgcagatttgccaagtatccgcttcctgtggaagcaagaccaaaaggaaatcaactgagtgggtgtttggaagaggaaggagcaactctcgggcagcctgcccaagggagggagcaagttgcaatttagaagatgccatacgtcgtgtgacagctcatgagcctttcactgggctggcaattgtctgaacacttgggttcagttgaaatatatgtattttggccaaaagccagcagcacttcacaaaaacaaaacacaaacctaagctaacaaaatgactgcattcgtctcttttttaaaggtagagattaaactgtatagacagcatagggatgaaaggaaccaagcgtttctgtgggattgagactggtacgtgtacgatgaacctgctgctttgttttctgagaagaggtttgaagacattttattaacagcttaatttttctcttttactccataggaacttattttaatagtaacattaacaacaagaatactaagactgtttgggaattttaaaaagctactagtgagaaaccaaatgataggttgtagagcctgatgactccaaacaaagccatcacccgcattcttcctccttcttctggtgctacagctccaagggcccttcaccttcatgtctgaaatggaactttggctttttcagtggaagaatatgttgaaggtttcattttgttctagaaaaaaaaaatccctcccaaagtggggcaaaaagctttatatttatttgattatccaaaatacagatcaaagtttagatctacattcttcattgtatttgctgtttcttaattgggcacacacaactcctggtcatgtcccagttcagcaccgatcgctaaggccgatcctgtagaatgcggctttcaagaggtcctaactgatcctttcttccactttgctgttgatttgttcacaaattatgtctgaatgagaaatcttctgtaagcagaagttatttaataattcccagcaccacgaaattgttatacatacatccctaccagtcacattccctgtgttcagagcctggaaatgaaattgagttcagttcagcctctctgtaatgaatcaagaaatgtaaaagagctttgagaccccaagggaaaggagagagttgcttctcatttctgattttattgtgctgttactctgtcgagtggctattaaaattgtcttatgctctttgggctaagaggggatcatctcgcttaagatgtactcctgatgtaaacatttcccccactttccaaataatggtaaagaaaacagtggcaagggctgttctgttttctggtacctgagtgaaactcagaagaaaagcaggcttagctaagagattttcactattaacctgtttttattagatcagcgaagacagtcatgcatcgcttaatgatggggatgcattctgagaaatgtgtcattaggctgttttgttgctgtgccaacatcctagattgtacttacacaacctacatggtatagcctactacacacctgggctgtgtggcatggcctattcctcttaggctacaaacctgtacagcatgttactgtactgaacacaatggtaagtatttgtgtatctaaacatagctaaacatagaaaaggtatggtaaaaatacaattttataatcttatgggactaccatcaatatgtagaccgtcattgaccaaaacatcctgatgtgtgcatgactgtacttttcattaaataacagataaggggctatagaatttggggctctgactgatcaaaacctgtgtatctgtgtcaagttttaagacccctgaaacagctaaaacaggtttccaaagtgtaatcactggatttcaaaaccatgttttagcccttcattaatgaagcctgttgtacagatttagagtcttacaatatgagggaagttggttctgggaaggtaagatgtagccagttttcatctgggcacctctgaaagagaaggagtgcaggagagtaagtctctcaaggacgttcaacaaaggaccagcagcatcttatcaggcgatcctcagaggctccaaggagcattggagagaatgcccctttctgggcttgatgtcttggttttggtttaataccaaatttctcttggtcttggtttaatacccgactcctcccaaattgaacgattatctttgtatgtcactcaaaaataccaggtttcctgaatatgttattaagaatttcagatatccaagcagaattttattatggacaccttgtaatgaattcaaatcgtgtgacagcaaacgggataaatggccccttctcacccagttccgctcagggccatacaggcttgcacatagagtgtgctaaaaatggtaacctcctttgagcattgcagaaagagggttctgtttcaaattgggctgaccgtaaaagcaattttgatgtctttcaaactaccataaagggattttaactgtatttttattcttagaaacaatacacctttaaacagatgtcaagaccaaagatgatgtataataaacagccggtggttatggtgtggtgtgagcaggcccccggatcaccagccctctgctggtggtcataaagcacacacagtttgtacttgcttcctctcgacgcctgccacaacagttttgccagtcaccaaactcagaaaaaactagctgtgtgagcagcaccgtaccctagcggtcttcagacattaagttcacgtcatccactgaaaggaagggtccttgcgttgacagcgtgtggctttggagtccgtttatggaagcactctacaatgaacagttgaattttatgtctattcttttttcctattttaaaagttctagtggtaacacaaactgtaaatttgagtcagaatgtttggagaaatgttgtttttttttttttcagagactactttgtcactcactgaccatgtctggttccttctctgaacttcattctccccataagccaaacaagaacagacctcccccgccacctcccaggcaccgtagttgtgagaatcagatgtgatcatgtgtgcagatgtcctgtgaggagggagcataaagcactgtgaaaatgtagcatgctgtctatgtggacgccctaggatgagtgatgtgaaacgctgcactactgcggtgaatgggttcacacatgggtaatgagcaaaaccgaaagctcggtgtgactcagtttcctcactcccattttgctttaatttcacttccttcaccaattttccgattgcatttattaagcatctttctgctcccgactttctggtgtctctggcaccaaataacccagcagacatgagccttgccttctgagattttagaatctaagatagcacgagtgggtatagaagatggaagataccgataaataacatggtttaagtgtcaataaaattcattcgaagagatcaggcgcggtggctcacgcctgtaatcccagcattttgggaggctgaggcaggtggatcacttgagatcaagagcttaaaaccagcccaggcaacatggcaaaaccccgtctctacaaaaaaatacaaaaactagctgggtgtggtggcgcatgcctgtagtcccagctgaggcacgataattgcttgaacccggggggtggaggttgcagtgagctgagattgcaccactgtactccaacctgggcgacagagcaagactgtgtctcaaaaagaaaaaaatttgttcaaaagacataaatgaattaggcacccagaagaagttgcatgtttggaaatgcaatatcttggggagacgtcaacttctgaagtgactttgaaggcagggcagctacccaggcaaatggcgtggaaggaagagctgagagtgggcctgggaaaggctgtagggaaggagtgaagctgtcactgaaatgaacttgatcttgatctgctttgatatggggacagaatccccgactgcactattgagggagtttcagaagagaaggaagaggtgctggaaggatgcttttgcagtcatgcagcaaggaaacgaccagggctgtgaagatctacagaggaagtactccagtgtgggggaggcaagggaagaggacgaaaatgatgagaatgacactgaggtcattgtttagagcagatctcaagcagccgtttggccacgccatatcctttgtggagcatagtgggttatctatctgtctgtctgtctatgtatctgtctatctatctatatatatattcagcttctttactgctacctacacatttttctccaaattttattaatttcatagtgttttgatttgggtggcagatgacttttaagcagtgggtgtttgccggccagatctttcctggcatgcggactgtgaggcaaagcacgggtgaaggtaggcgctaaaggctttgggctaaagccagcacgcggttctgtgctataggagtctcccgtttcccgtggacaggttcagcgttccttctttcgcacaacttttttctaagtgttccagtgaccaagccagtcattcggacactgatttgcagtgcattggcagtaattcacaaattagttgttatataagtctctctcatccctttcacactagattctcagacatgaatgaatttgtcgtttggaaggaaagctgggtaacgttttgggcacaggggaaggaggactccggtcttaactcccacgctaactttagctcaagtggagttttcaccgtggtcatttctacctccggagcaaggtgccagcgccagtactagagcctgcttatccacatttgccctggacaggagcaggaggaagtccacttctgtaccggcagacagagcatgtgaacacaaaacacatttctatggcatagtcaactgaacttcatttttacatttaatctaacatgttaacacgttctaacagggtttctatgagcagctgctgtaacatactcatcaactatgatagacttaacacttgttacctaatgaacaaggaggatgtgcatttcgggtttcttttgatattcgtggaggtgattgtcagtgtttaaacaggactactttctccactatgaagatgacttggaaatcgcaacatcatggtacattgctaagtccatgcttgtgtgtgtgacagtaggcttgataatttatcttaaaacacagcagcattgaaatttaggaaaagaatattaaatgcctttggaaacatgaaacaaagttaggagccagtaagaaagtgacagaagcaatgaatgtcttaatgcagtatagttaaaatggcttcccacagggtagataattatccaggatccttccttttccttcttcctccaggtttttcaggggtcacttcacatttctaaagaaagagtgaataggctgggcatggtggctcaagcctctaatctcaacgctttgggaggctgaggcaggaggatcgcttgaggccaggagtttgagaccaccttgggcaacataacgagaccccgtctctacaaaaaaaatttaaaaattagctgagcatggtggcatgtgccagtagtcccagctactcgaaaggctaagactggaggatcgcttgagccaatgagttggaggctgcagtgagctataatcacgccactgcactccagcctgggctgcagggtgaggtcctgtctctggaaaaaaaaaaaaaaaaaaaaggaataggtaaaagggacagaggtgaaattttgagtgacttgagtctcttgcagtccctgattacacagaacctttctgggctacttggagcatcacgaatagtctttcctgtacttaccagatttcaagtattcataacttgactccctaagtgtacaagttgggaatagtacagggccaagttcaagtcgcatatgctgtactgttcctcctgcaaatgtggggaaagaagagggagatactagaggaactgaggctccacccattcattcagttgctctaagcaccagaggacttgtttcagaaaaggggagtgggaacgccctcgactttgccctcctccggagcatctctgggacgcagggagtctggctagcgttaataggaaaggttgctcggcagagctgccctggagtactgacttgtctctccctcctttgtcaaggtccatgtttttctggctcttcctgcacactcatccctagattatgagcgttaatgtacgaaatgtgcagagcaaattgaggccaactgtggcatcaatactgcaacttaaacttgacaatcatggtttgctggtcctcaaacaggcactgaaatctcagtatgggtatacgatttaataatcggcccctcccttctatttgtcggttttatgtttctatccttcaatagctgcactgttttctaatgtgctgtagagtttttgaaataatttatgcaagtatttggtttccatgtttacaatttatacagctttcctagcattttaaatggaaatgtcaataaatgctatgaattggtgtcaaa

SEQ ID NO: 54 - DNA, 12498 bp, Homo sapiens
ctctccggcctccctccgcgccggtgcgcggcgccccgtcccagccgcagccgcagcggccgcccctcccggacccgagagccgctgagccgcgaggccgggccggggcgccggccgggaatgccgggggcgcggcgccgacgccgaggcgcggccatggaggggaagccccgcgccggggtcgcgctggccccggggccgagcggccgacggccttccgcccgctgcgcccgccgccgccgcccggggctgctgcttcctggcctctggctgctgctgctggcccggccggcctcgtgcgccccagatgagctctctccggaacagcacaacctttctttatactccatggagctcgtgctgaagaaaagcactgggcacagcgctgcacaagtggccttaacagaaactgctcccggctcccagcacagcagtcctctccatgtcacagccccgccgtctgccactacttttgatacagccttttttaaccaaggaaaacagaccaaaagtacagcagatcccagcatctttgtggcaacttacgtgtcagtgacgagtaaagaggtggccgtcaatgacgatgagatggataactttctgccagatactcactggaccactccacggatggtttctccaatacagtatatcacagtcagcccaccagggctgcccagggaagcattagaacctatgctcactccatcattacccatggtttctttacaagatgaagaagtgacatcgggctggcagaacacaacgcgacaaccagcggcatatgctgagtccgccagtcatttccacacctttcggtcagcttttcgcacctctgagggcatcgttccaactcctggcaggaatttggtgctttatcctactgatgcttacagtcatttatcaagcaggactctgccagagattgtggcttccctaacagagggtgtggaaaccaccctttttttaagctcccggtctttaatgccacagccgttaggcgacggcattactataccgttgccctccttgggggaggtctcacagcctccagaggaggtttgggccacaagtgcagacagatacactgatgtgaccactgtgttgagtcaaagcctagaagaaaccatctctccaagaacataccccactgtgactgcatcgcacgcagcccttgcattcagcaggacacattctccattgctttcaactcctcttgcatttgcgtcctctgcttcaccaactgatgtttcatctaacccctttctccctagcgactccagcaaaacatccgaattgcatagcaattcagccctccccggtcctgtggacaacactcatatcctgagcccggtgtcctcattcagaccatacacttggtgtgcggcctgcactgtgccttcacctcagcaagttctggccacgagcctcatggagaaagacgtgggatcaggggatggtgccgagactctgtgcatgaccgtgctggaagaaagcagcatctctctaatgagtagcgtcgtagcagacttctctgaatttgaggaagatcctcaagtatttaatacgcttttcccctccagacctatcgtcccactttcttctagatccatggaaatctcagagacgagtgttggcatttctgccgaggtggatatgagtagtgttacaaccacacaggttccccctgcccacggccgcctctctgtgccggcgtcacttgatcctactgctggctccttgtctgttgctgaaacccaagtgacgccatccagcgtgaccactgcatttttctcggtcatcaccagcattctccttgactcatctttctctgtcatagcaaacaaaaacacaccgtcgcttgccgtcagagacccgagtgtttttacgccttatagtctggttccttcagtggagtcttcacttttctctgaccaagaacgttccagtttttctgagcataaacccagaggtgctttggattttgcatccagctttttctcaacacccccgctggaactcagcggctccatctcttcgccttcggaagcacctgcgtctctgtctctgatgccgagtgacttgtcccccttcacatctcagtctttttctcccttggttgagacatttacattgtttgactctagtgatctgcagtcatctcagctgtctcttcccagttccacaaatcttgagttttcgcagctccagccaagttccgagctgcctttaaacaccatcatgttgctacctagccgttctgaggtgtcaccatggtcaagcttcccttctgattctctcgagtttgttgaagcgtctacggtttcactgacggattcagaagctcattttacctcagctttcattgaaactacctcctatcttgagtcttcactcatttcccatgaatccgcagtcactgcactggtgccccccggctctgagtcttttgacattttgactgccgggattcaagcaacatcaccattgaccactgtccacacaacgcccattttaactgagtcttctttgttctcaactctgacacctcctgacgaccaaatcagtgctctagacggtcacgtgtctgtcctggcctctttctccaaagccattcccactggtacggtgttgatcactgacgcgtacctgccatcaggatcctcgtttgtttctgaagcaacccccttccctctgcccacagagctgaccgtcgtgggcccatcactcacacccacagaggtgccactgaacacctccacggaagtgagcacaaccagcaccggtgctgccactggtggtcccctcgactccaccctgatgggtgacgccgcaagtcagagccccccagagagtagtgctgctcctcccctgccatccctgcgtcccgtgactgccttcactctcgaagcaacagtcgacacaccaacactggctactgccaagccgccatatgtttgtgatatcacagtccccgatgcctatctgatcacaactgtgctggccagaagagctgtgcaggagtacatcattacagcaatcaaagaagtactgaggattcacttcaaccgtgcagtggaactgaaggtttacgaactatttactgacttcacttttctggtaacatccggtcctttcgtttacacggcaatatccgtcataaatgtgcttataaacagtaagcttgtccgtgaccagactcctttaatcctgtctgtgaaaccttctttccttgtgccagagtccaggttccaagttcaaacagtacttcagtttgtgcctccgagtgtggatactggcttctgcaacttcacccagcgcattgagaaaggcctaatgacagctctctttgaagtgagaaaacaccaccagggaacgtataacctcacggtgcagatcttgaatatcaccatcagttcctcaagggtgactcctcggcggggcccggtgaatatcatctttgcggttaaaagcacacagggatttttgaatgggtcggaagtgagcgagctgctcagaaacttgagtgtggtggagttcagtttctatctgggatacccagtgctgcagatcgcagagcccttccagtatccacagctcaacttatctcagttgctgaagtcctcttgggtcagaacagttctcctgggcgtcatggagaagcaactccagaatgaagtgtttcaagccgagatggaacgcaagctggcccagctgctcagcgaggtttccaccagaaggcggatgtggagaagggccactgtagctgcagggaacagtgtggtgcaggtggtaaatgtgtcgaggctggagggagatgacaatccggtacagctcatctactttgtggaggatcaagatggagaaagactcagtgcagtcaagtcttcggacctgattaacaaaatggacctccagagagcagccatcatcttgggttaccgaattcaaggtgtcattgcccagcctgtcgacagggtgaagaggccgtctccggaatcccagagcaacaacttgtgggtcattgttggcgtggtcatcccagtgctggtggtgatggtgattgttgtcatcctctactggaaactatgccgcacagacaagctagactttcagcctgacactgtggccaacattcagcagcgtcagaagctgcagatccctagtgtgaagggcttcgattttgctaagcagcatctgggtcagcacaataaagacgacatattgattattcatgagccagcgccactgccaggacctctgaaggaccacaccacgccctcggaaaatggagacgtgccaagccccaagtcaaagatcccttccaagaatgttcgtcacagaggaagagtttctccctcagatgctgactctacggtcagtgaagagtccagcgagagggacgcaggagataagacgccgggagccgtcaacgatggcaggtcccacagagctccgcagagcgggccaccactgcccagttcgggaaatgagcagcactcatcagcctccatcttcgagcacgtggacaggatctcccgccccccggaggctagccggcgggtccccagtaagatccagcttatcgccatgcagccgatcccggcacctcccgtccagcgcccctccccagccgaccgagtggcggaaagcaataaaatcaacaaagagattcagaccgcgctgcggcacaagtctgagatcgagcaccatcgcaacaagatccgcctgcgcgccaagcgccgcgggcactacgagttcccggtggtagacgacctgtcctcgggcgacactaaggagcgacaccgggtgtaccgcagggcacagatgcagatcgacaagatcctggaccccacggccagcgtgccctccgtgttcatagagcccaggaagagctcacggataaaacgttctcccaagcctcgccggaaacaccaggtcaacggctgtcctgccgacgctgagaaggaccggctcatcaccacagacagcgatggcacctacaggaggccccccggcgtccacaactcagcctacatcggatgcccatcggatcctgacctcccagccgatgtgcagacaccatcctcggtggaactggggaggtatccagcccttcccttcccggcctcccagtacatcccaccccagccgtccatcgaggaggcacgccagaccatgcactccctcctggacgacgcctttgccctcgtggcccccagcagccagcctgccagcaccgcaggtgtaggccccggagtcccacccggcctgcccgcaaacagcaccccttcccaggaagagaggcgagccacccagtgggggtccttctacagcccagcccagacggccaacaatccctgcagtagatacgaagactatggaatgactcccccgacgggtccattgccaagaccaggttttggccccggtttgctgcagtctacagagctggtgccccctgaccctcagcagccacaggcctccgccgaagccccatttgctgccagagggatctactcggaggagatgccgtcggtggcccggcctcggcctgtcgggggtaccacaggctcccagatccagcacctgacacaggtggggattgccagcagaattggagctcagccagtggaaatcccgccaagcagaggcagccagtatggggggccaggctggccttcgtacggggaggacgaagcggggcgaagagaggccacacacatgctcggacatcaagagtattcttcttcaccgctatttcaggtgccaaggacttcaggcagggagccctcagctccttccgggaacctcccccaccggggactgcagggccctgggctgggttaccccaccagctccacggaagacctccagcctggccactcctcggcctctctcatcaaagcaatccgcgaggagctcctccggctctcccagaaacagagcaccgtgcagaacttccacagctgatcggcctcgcctcgcagatttgccaagtatccgcttcctgtggaagcaagaccaaaaggaaatcaactgagtgggtgtttggaagaggaaggagcaactctcgggcagcctgcccaagggagggagcaagttgcaatttagaagatgccatacgtcgtgtgacagctcatgagcctttcactgggctggcaattgtctgaacacttgggttcagttgaaatatatgtattttggccaaaagccagcagcacttcacaaaaacaaaacacaaacctaagctaacaaaatgactgcattcgtctcttttttaaaggtagagattaaactgtatagacagcatagggatgaaaggaaccaagcgtttctgtgggattgagactggtacgtgtacgatgaacctgctgctttgttttctgagaagaggtttgaagacattttattaacagcttaatttttctcttttactccataggaacttattttaatagtaacattaacaacaagaatactaagactgtttgggaattttaaaaagctactagtgagaaaccaaatgataggttgtagagcctgatgactccaaacaaagccatcacccgcattcttcctccttcttctggtgctacagctccaagggcccttcaccttcatgtctgaaatggaactttggctttttcagtggaagaatatgttgaaggtttcattttgttctagaaaaaaaaaatccctcccaaagtggggcaaaaagctttatatttatttgattatccaaaatacagatcaaagtttagatctacattcttcattgtatttgctgtttcttaattgggcacacacaactcctggtcatgtcccagttcagcaccgatcgctaaggccgatcctgtagaatgcggctttcaagaggtcctaactgatcctttcttccactttgctgttgatttgttcacaaattatgtctgaatgagaaatcttctgtaagcagaagttatttaataattcccagcaccacgaaattgttatacatacatccctaccagtcacattccctgtgttcagagcctggaaatgaaattgagttcagttcagcctctctgtaatgaatcaagaaatgtaaaagagctttgagaccccaagggaaaggagagagttgcttctcatttctgattttattgtgctgttactctgtcgagtggctattaaaattgtcttatgctctttgggctaagaggggatcatctcgcttaagatgtactcctgatgtaaacatttcccccactttccaaataatggtaaagaaaacagtggcaagggctgttctgttttctggtacctgagtgaaactcagaagaaaagcaggcttagctaagagattttcactattaacctgtttttattagatcagcgaagacagtcatgcatcgcttaatgatggggatgcattctgagaaatgtgtcattaggctgttttgttgctgtgccaacatcctagattgtacttacacaacctacatggtatagcctactacacacctgggctgtgtggcatggcctattcctcttaggctacaaacctgtacagcatgttactgtactgaacacaatggtaagtatttgtgtatctaaacatagctaaacatagaaaaggtatggtaaaaatacaattttataatcttatgggactaccatcaatatgtagaccgtcattgaccaaaacatcctgatgtgtgcatgactgtacttttcattaaataacagataaggggctatagaatttggggctctgactgatcaaaacctgtgtatctgtgtcaagttttaagacccctgaaacagctaaaacaggtttccaaagtgtaatcactggatttcaaaaccatgttttagcccttcattaatgaagcctgttgtacagatttagagtcttacaatatgagggaagttggttctgggaaggtaagatgtagccagttttcatctgggcacctctgaaagagaaggagtgcaggagagtaagtctctcaaggacgttcaacaaaggaccagcagcatcttatcaggcgatcctcagaggctccaaggagcattggagagaatgcccctttctgggcttgatgtcttggttttggtttaataccaaatttctcttggtcttggtttaatacccgactcctcccaaattgaacgattatctttgtatgtcactcaaaaataccaggtttcctgaatatgttattaagaatttcagatatccaagcagaattttattatggacaccttgtaatgaattcaaatcgtgtgacagcaaacgggataaatggccccttctcacccagttccgctcagggccatacaggcttgcacatagagtgtgctaaaaatggtaacctcctttgagcattgcagaaagagggttctgtttcaaattgggctgaccgtaaaagcaattttgatgtctttcaaactaccataaagggattttaactgtatttttattcttagaaacaatacacctttaaacagatgtcaagaccaaagatgatgtataataaacagccggtggttatggtgtggtgtgagcaggcccccggatcaccagccctctgctggtggtcataaagcacacacagtttgtacttgcttcctctcgacgcctgccacaacagttttgccagtcaccaaactcagaaaaaactagctgtgtgagcagcaccgtaccctagcggtcttcagacattaagttcacgtcatccactgaaaggaagggtccttgcgttgacagcgtgtggctttggagtccgtttatggaagcactctacaatgaacagttgaattttatgtctattcttttttcctattttaaaagttctagtggtaacacaaactgtaaatttgagtcagaatgtttggagaaatgttgtttttttttttttcagagactactttgtcactcactgaccatgtctggttccttctctgaacttcattctccccataagccaaacaagaacagacctcccccgccacctcccaggcaccgtagttgtgagaatcagatgtgatcatgtgtgcagatgtcctgtgaggagggagcataaagcactgtgaaaatgtagcatgctgtctatgtggacgccctaggatgagtgatgtgaaacgctgcactactgcggtgaatgggttcacacatgggtaatgagcaaaaccgaaagctcggtgtgactcagtttcctcactcccattttgctttaatttcacttccttcaccaattttccgattgcatttattaagcatctttctgctcccgactttctggtgtctctggcaccaaataacccagcagacatgagccttgccttctgagattttagaatctaagatagcacgagtgggtatagaagatggaagataccgataaataacatggtttaagtgtcaataaaattcattcgaagagatcaggcgcggtggctcacgcctgtaatcccagcattttgggaggctgaggcaggtggatcacttgagatcaagagcttaaaaccagcccaggcaacatggcaaaaccccgtctctacaaaaaaatacaaaaactagctgggtgtggtggcgcatgcctgtagtcccagctgaggcacgataattgcttgaacccggggggtggaggttgcagtgagctgagattgcaccactgtactccaacctgggcgacagagcaagactgtgtctcaaaaagaaaaaaatttgttcaaaagacataaatgaattaggcacccagaagaagttgcatgtttggaaatgcaatatcttggggagacgtcaacttctgaagtgactttgaaggcagggcagctacccaggcaaatggcgtggaaggaagagctgagagtgggcctgggaaaggctgtagggaaggagtgaagctgtcactgaaatgaacttgatcttgatctgctttgatatggggacagaatccccgactgcactattgagggagtttcagaagagaaggaagaggtgctggaaggatgcttttgcagtcatgcagcaaggaaacgaccagggctgtgaagatctacagaggaagtactccagtgtgggggaggcaagggaagaggacgaaaatgatgagaatgacactgaggtcattgtttagagcagatctcaagcagccgtttggccacgccatatcctttgtggagcatagtgggttatctatctgtctgtctgtctatgtatctgtctatctatctatatatatattcagcttctttactgctacctacacatttttctccaaattttattaatttcatagtgttttgatttgggtggcagatgacttttaagcagtgggtgtttgccggccagatctttcctggcatgcggactgtgaggcaaagcacgggtgaaggtaggcgctaaaggctttgggctaaagccagcacgcggttctgtgctataggagtctcccgtttcccgtggacaggttcagcgttccttctttcgcacaacttttttctaagtgttccagtgaccaagccagtcattcggacactgatttgcagtgcattggcagtaattcacaaattagttgttatataagtctctctcatccctttcacactagattctcagacatgaatgaatttgtcgtttggaaggaaagctgggtaacgttttgggcacaggggaaggaggactccggtcttaactcccacgctaactttagctcaagtggagttttcaccgtggtcatttctacctccggagcaaggtgccagcgccagtactagagcctgcttatccacatttgccctggacaggagcaggaggaagtccacttctgtaccggcagacagagcatgtgaacacaaaacacatttctatggcatagtcaactgaacttcatttttacatttaatctaacatgttaacacgttctaacagggtttctatgagcagctgctgtaacatactcatcaactatgatagacttaacacttgttacctaatgaacaaggaggatgtgcatttcgggtttcttttgatattcgtggaggtgattgtcagtgtttaaacaggactactttctccactatgaagatgacttggaaatcgcaacatcatggtacattgctaagtccatgcttgtgtgtgtgacagtaggcttgataatttatcttaaaacacagcagcattgaaatttaggaaaagaatattaaatgcctttggaaacatgaaacaaagttaggagccagtaagaaagtgacagaagcaatgaatgtcttaatgcagtatagttaaaatggcttcccacagggtagataattatccaggatccttccttttccttcttcctccaggtttttcaggggtcacttcacatttctaaagaaagagtgaataggctgggcatggtggctcaagcctctaatctcaacgctttgggaggctgaggcaggaggatcgcttgaggccaggagtttgagaccaccttgggcaacataacgagaccccgtctctacaaaaaaaatttaaaaattagctgagcatggtggcatgtgccagtagtcccagctactcgaaaggctaagactggaggatcgcttgagccaatgagttggaggctgcagtgagctataatcacgccactgcactccagcctgggctgcagggtgaggtcctgtctctggaaaaaaaaaaaaaaaaaaaaggaataggtaaaagggacagaggtgaaattttgagtgacttgagtctcttgcagtccctgattacacagaacctttctgggctacttggagcatcacgaatagtctttcctgtacttaccagatttcaagtattcataacttgactccctaagtgtacaagttgggaatagtacagggccaagttcaagtcgcatatgctgtactgttcctcctgcaaatgtggggaaagaagagggagatactagaggaactgaggctccacccattcattcagttgctctaagcaccagaggacttgtttcagaaaaggggagtgggaacgccctcgactttgccctcctccggagcatctctgggacgcagggagtctggctagcgttaataggaaaggttgctcggcagagctgccctggagtactgacttgtctctccctcctttgtcaaggtccatgtttttctggctcttcctgcacactcatccctagattatgagcgttaatgtacgaaatgtgcagagcaaattgaggccaactgtggcatcaatactgcaacttaaacttgacaatcatggtttgctggtcctcaaacaggcactgaaatctcagtatgggtatacgatttaataatcggcccctcccttctatttgtcggttttatgtttctatccttcaatagctgcactgttttctaatgtgctgtagagtttttgaaataatttatgcaagtatttggtttccatgtttacaatttatacagctttcctagcattttaaatggaaatgtcaataaatgctatgaattggtgtcaaa

SEQ ID NO: 55 - protein, 1934 aa, Homo sapiens
MPGARRRRRGAAMEGKPRAGVALAPGPSGRRPSARCARRRRPGLLLPGLWLLLLARPASCAPDELSPEQHNLSLYSMELVLKKSTGHSAAQVALTETAPGSQHSSPLHVTAPPSATTFDTAFFNQGKQTKSTADPSIFVATYVSVTSKEVAVNDDEMDNFLPDTHWTTPRMVSPIQYITVSPPGLPREALEPMLTPSLPMVSLQDEEVTSGWQNTTRQPAAYAESASHFHTFRSAFRTSEGIVPTPGRNLVLYPTDAYSHLSSRTLPEIVASLTEGVETTLFLSSRSLMPQPLGDGITIPLPSLGEVSQPPEEVWATSADRYTDVTTVLSQSLEETISPRTYPTVTASHAALAFSRTHSPLLSTPLAFASSASPTDVSSNPFLPSDSSKTSELHSNSALPGPVDNTHILSPVSSFRPYTWCAACTVPSPQQVLATSLMEKDVGSGDGAETLCMTVLEESSISLMSSVVADFSEFEEDPQVFNTLFPSRPIVPLSSRSMEISETSVGISAEVDMSSVTTTQVPPAHGRLSVPASLDPTAGSLSVAETQVTPSSVTTAFFSVITSILLDSSFSVIANKNTPSLAVRDPSVFTPYSLVPSVESSLFSDQERSSFSEHKPRGALDFASSFFSTPPLELSGSISSPSEAPASLSLMPSDLSPFTSQSFSPLVETFTLFDSSDLQSSQLSLPSSTNLEFSQLQPSSELPLNTIMLLPSRSEVSPWSSFPSDSLEFVEASTVSLTDSEAHFTSAFIETTSYLESSLISHESAVTALVPPGSESFDILTAGIQATSPLTTVHTTPILTESSLFSTLTPPDDQISALDGHVSVLASFSKAIPTGTVLITDAYLPSGSSFVSEATPFPLPTELTVVGPSLTPTEVPLNTSTEVSTTSTGAATGGPLDSTLMGDAASQSPPESSAAPPLPSLRPVTAFTLEATVDTPTLATAKPPYVCDITVPDAYLITTVLARRAVQEYIITAIKEVLRIHFNRAVELKVYELFTDFTFLVTSGPFVYTAISVINVLINSKLVRDQTPLILSVKPSFLVPESRFQVQTVLQFVPPSVDTGFCNFTQRIEKGLMTALFEVRKHHQGTYNLTVQILNITISSSRVTPRRGPVNIIFAVKSTQGFLNGSEVSELLRNLSVVEFSFYLGYPVLQIAEPFQYPQLNLSQLLKSSWVRTVLLGVMEKQLQNEVFQAEMERKLAQLLSEVSTRRRMWRRATVAAGNSVVQVVNVSRLEGDDNPVQLIYFVEDQDGERLSAVKSSDLINKMDLQRAAIILGYRIQGVIAQPVDRVKRPSPESQSNNLWVIVGVVIPVLVVMVIVVILYWKLCRTDKLDFQPDTVANIQQRQKLQIPSVKGFDFAKQHLGQHNKDDILIIHEPAPLPGPLKDHTTPSENGDVPSPKSKIPSKNVRHRGRVSPSDADSTVSEESSERDAGDKTPGAVNDGRSHRAPQSGPPLPSSGNEQHSSASIFEHVDRISRPPEASRRVPSKIQLIAMQPIPAPPVQRPSPADRVAESNKINKEIQTALRHKSEIEHHRNKIRLRAKRRGHYEFPVVDDLSSGDTKERHRVYRRAQMQIDKILDPTASVPSVFIEPRKSSRIKRSPKPRRKHQVNGCPADAEKDRLITTDSDGTYRRPPGVHNSAYIGCPSDPDLPADVQTPSSVELGRYPALPFPASQYIPPQPSIEEARQTMHSLLDDAFALVAPSSQPASTAGVGPGVPPGLPANSTPSQEERRATQWGSFYSPAQTANNPCSRYEDYGMTPPTGPLPRPGFGPGLLQSTELVPPDPQQPQASAEAPFAARGIYSEEMPSVARPRPVGGTTGSQIQHLTQVGIASRIGAQPVEIPPSRGSQYGGPGWPSYGEDEAGRREAVPRTSGREPSAPSGNLPHRGLQGPGLGYPTSSTEDLQPGHSSASLIKAIREELLRLSQKQSTVQNFHS

SEQ ID NO: 56 - protein, 1950 aa, Homo sapiens
MPGARRRRRGAAMEGKPRAGVALAPGPSGRRPSARCARRRRPGLLLPGLWLLLLARPASCAPDELSPEQHNLSLYSMELVLKKSTGHSAAQVALTETAPGSQHSSPLHVTAPPSATTFDTAFFNQGKQTKSTADPSIFVATYVSVTSKEVAVNDDEMDNFLPDTHWTTPRMVSPIQYITVSPPGLPREALEPMLTPSLPMVSLQDEEVTSGWQNTTRQPAAYAESASHFHTFRSAFRTSEGIVPTPGRNLVLYPTDAYSHLSSRTLPEIVASLTEGVETTLFLSSRSLMPQPLGDGITIPLPSLGEVSQPPEEVWATSADRYTDVTTVLSQSLEETISPRTYPTVTASHAALAFSRTHSPLLSTPLAFASSASPTDVSSNPFLPSDSSKTSELHSNSALPGPVDNTHILSPVSSFRPYTWCAACTVPSPQQVLATSLMEKDVGSGDGAETLCMTVLEESSISLMSSVVADFSEFEEDPQVFNTLFPSRPIVPLSSRSMEISETSVGISAEVDMSSVTTTQVPPAHGRLSVPASLDPTAGSLSVAETQVTPSSVTTAFFSVITSILLDSSFSVIANKNTPSLAVRDPSVFTPYSLVPSVESSLFSDQERSSFSEHKPRGALDFASSFFSTPPLELSGSISSPSEAPASLSLMPSDLSPFTSQSFSPLVETFTLFDSSDLQSSQLSLPSSTNLEFSQLQPSSELPLNTIMLLPSRSEVSPWSSFPSDSLEFVEASTVSLTDSEAHFTSAFIETTSYLESSLISHESAVTALVPPGSESFDILTAGIQATSPLTTVHTTPILTESSLFSTLTPPDDQISALDGHVSVLASFSKAIPTGTVLITDAYLPSGSSFVSEATPFPLPTELTVVGPSLTPTEVPLNTSTEVSTTSTGAATGGPLDSTLMGDAASQSPPESSAAPPLPSLRPVTAFTLEATVDTPTLATAKPPYVCDITVPDAYLITTVLARRAVQEYIITAIKEVLRIHFNRAVELKVYELFTDFTFLVTSGPFVYTAISVINVLINSKLVRDQTPLILSVKPSFLVPESRFQVQTVLQFVPPSVDTGFCNFTQRIEKGLMTALFEVRKHHQGTYNLTVQILNITISSSRVTPRRGPVNIIFAVKSTQGFLNGSEVSELLRNLSVVEFSFYLGYPVLQIAEPFQYPQLNLSQLLKSSWVRTVLLGVMEKQLQNEVFQAEMERKLAQLLSEVSTRRRMWRRATVAAGNSVVQVVNVSRLEGDDNPVQLIYFVEDQDGERLSAVKSSDLINKMDLQRAAIILGYRIQGVIAQPVDRVKRPSPESQSNNLWVIVGVVIPVLVVMVIVVILYWKLCRTDKLDFQPDTVANIQQRQKLQIPSVKGFDFAKQHLGQHNKDDILIIHEPAPLPGPLKDHTTPSENGDVPSPKSKIPSKNVRHRGRVSPSDADSTVSEESSERDAGDKTPGAVNDGRSHRAPQSGPPLPSSGNEQHSSASIFEHVDRISRPPEASRRVPSKIQLIAMQPIPAPPVQRPSPADRVAESNKINKEIQTALRHKSEIEHHRNKIRLRAKRRGHYEFPVVDDLSSGDTKERHRVYRRAQMQIDKILDPTASVPSVFIEPRKSSRIKRSPKPRRKHQVNGCPADAEKDRLITTDSDGTYRRPPGVHNSAYIGCPSDPDLPADVQTPSSVELGRYPALPFPASQYIPPQPSIEEARQTMHSLLDDAFALVAPSSQPASTAGVGPGVPPGLPANSTPSQEERRATQWGSFYSPAQTANNPCSRYEDYGMTPPTGPLPRPGFGPGLLQSTELVPPDPQQPQASAEAPFAARGIYSEEMPSVARPRPVGGTTGSQIQHLTQVGIASRIGAQPVEIPPSRGSQYGGPGWPSYGEDEAGRREATHMLGHQEYSSSPLFQVPRTSGREPSAPSGNLPHRGLQGPGLGYPTSSTEDLQPGHSSASLIKAIREELLRLSQKQSTVQNFHS

SEQ ID NO: 57 - DNA, 1671 bp, Homo sapiens
acagcttcctgccgcaggcgggcgggagggcgggcacggagaggcgggcgccgaggaggggcaggtagggctgggacgcaggggtaactggatcccccgacttcagcccaggccctggtctgaccaccctgggagcagggactttccacagtcagctggacgcacactcagcccagtaaaagaggggacccatcccgggagccccggggagggcacagctgcctcctcccgggctcccctgccacctggtgcctacctgccccctgctccctgccgggtccggtcctcaccccatcttcatctggccttgactctgcccttgaggggcctaggggtgcagccagcctgctccgagctcccctgcagatggaggaggccatcctggtcccctgcgtgctggggctcctgctgctgcccatcctggccatgttgatggcactgtgtgtgcactgccacagactgccaggctcctacgacagcacatcctcagatagtttgtatccaaggggcatccagttcaaacggcctcacacggttgccccctggccacctgcctacccacctgtcacctcctacccacccctgagccagccagacctgctccccatcccaagatccccgcagccccttgggggctcccaccggacgccatcttcccggcgggattctgatggtgccaacagtgtggcgagctacgagaacgaggaaccagcctgtgaggatgcggatgaggatgaggacgactatcacaacccaggctacctggtggtgcttcctgacagcaccccggccactagcactgctgccccatcagctcctgcactcagcacccctggcatccgagacagtgccttctccatggagtccattgatgattacgtgaacgttccggagagcggggagagcgcagaagcgtctctggatggcagccgggagtatgtgaatgtgtcccaggaactgcatcctggagcggctaagactgagcctgccgccctgagttcccaggaggcagaggaagtggaggaagagggggctccagattacgagaatctgcaggagctgaactgagggcctgtggaggccgagtctgtcctggaaccaggcttgcctgggacggctgagctgggcagctggaagtggctctggggtcctcacatggcgtcctgcccttgctccagcctgacaacagcctgagaaatccccccgtaacttattatcactttggggttcggcctgtgtcccccgaacgctctgcaccttctgacgcagcctgagaatgacctgccctggccccagccctactctgtgtaatagaataaaggcctgcgtgtgtctgtgttgagcgtgcgtctgtgtgtgcctgtgtgcgagtctgagtcagagatttggagatgtctctgtgtgtttgtgtgtatctgtgggtctccatcctccatgggggctcagccaggtgctgtgacaccccccttctgaatgaagccttctgacctgggctggcactgctgggggtgaggacacattgccccatgagacagtcccagaacacggcagctgctggctgtgacaatggtttcaccatccttagaccaagggatgggacctgatgacctgggaggactctcttagttcttaccttttgtggttctcaataaaacagaacttaaaaaattg

SEQ ID NO: 58 - DNA, 1758 bp, Homo sapiens
acagcttcctgccgcaggcgggcgggagggcgggcacggagaggcgggcgccgaggaggggcaggtagggctgggacgcaggggtaactggatcccccgacttcagcccaggccctggtctgaccaccctgggagcagggactttccacagtcagctggacgcacactcagcccagtaaaagaggggacccatcccgggagccccggggagggcacagctgcctcctcccgggctcccctgccacctggtgcctacctgccccctgctccctgccgggtccggtcctcaccccatcttcatctggccttgactctgcccttgaggggcctaggggtgcagccagcctgctccgagctcccctgcagatggaggaggccatcctggtcccctgcgtgctggggctcctgctgctgcccatcctggccatgttgatggcactgtgtgtgcactgccacagactgccaggctcctacgacagcacatcctcagatagtttgtatccaaggggcatccagttcaaacggcctcacacggttgccccctggccacctgcctacccacctgtcacctcctacccacccctgagccagccagacctgctccccatcccaagatccccgcagccccttgggggctcccaccggacgccatcttcccggcgggattctgatggtgccaacagtgtggcgagctacgagaacgagggtgcgtctgggatccgaggtgcccaggctgggtggggagtctggggtccgtcctggactaggctgacccctgtgtcgttacccccagaaccagcctgtgaggatgcggatgaggatgaggacgactatcacaacccaggctacctggtggtgcttcctgacagcaccccggccactagcactgctgccccatcagctcctgcactcagcacccctggcatccgagacagtgccttctccatggagtccattgatgattacgtgaacgttccggagagcggggagagcgcagaagcgtctctggatggcagccgggagtatgtgaatgtgtcccaggaactgcatcctggagcggctaagactgagcctgccgccctgagttcccaggaggcagaggaagtggaggaagagggggctccagattacgagaatctgcaggagctgaactgagggcctgtggaggccgagtctgtcctggaaccaggcttgcctgggacggctgagctgggcagctggaagtggctctggggtcctcacatggcgtcctgcccttgctccagcctgacaacagcctgagaaatccccccgtaacttattatcactttggggttcggcctgtgtcccccgaacgctctgcaccttctgacgcagcctgagaatgacctgccctggccccagccctactctgtgtaatagaataaaggcctgcgtgtgtctgtgttgagcgtgcgtctgtgtgtgcctgtgtgcgagtctgagtcagagatttggagatgtctctgtgtgtttgtgtgtatctgtgggtctccatcctccatgggggctcagccaggtgctgtgacaccccccttctgaatgaagccttctgacctgggctggcactgctgggggtgaggacacattgccccatgagacagtcccagaacacggcagctgctggctgtgacaatggtttcaccatccttagaccaagggatgggacctgatgacctgggaggactctcttagttcttaccttttgtggttctcaataaaacagaacttaaaaaattg

SEQ ID NO: 59 - protein, 233 aa, Homo sapiens
MEEAILVPCVLGLLLLPILAMLMALCVHCHRLPGSYDSTSSDSLYPRGIQFKRPHTVAPWPPAYPPVTSYPPLSQPDLLPIPRSPQPLGGSHRTPSSRRDSDGANSVASYENEEPACEDADEDEDDYHNPGYLVVLPDSTPATSTAAPSAPALSTPGIRDSAFSMESIDDYVNVPESGESAEASLDGSREYVNVSQELHPGAAKTEPAALSSQEAEEVEEEGAPDYENLQELN

SEQ ID NO: 60 - protein, 262 aa, Homo sapiens
MEEAILVPCVLGLLLLPILAMLMALCVHCHRLPGSYDSTSSDSLYPRGIQFKRPHTVAPWPPAYPPVTSYPPLSQPDLLPIPRSPQPLGGSHRTPSSRRDSDGANSVASYENEGASGIRGAQAGWGVWGPSWTRLTPVSLPPEPACEDADEDEDDYHNPGYLVVLPDSTPATSTAAPSAPALSTPGIRDSAFSMESIDDYVNVPESGESAEASLDGSREYVNVSQELHPGAAKTEPAALSSQEAEEVEEEGAPDYENLQELN

SEQ ID NO: 61 - DNA, 2091 bp, Homo sapiens
gagacaggtggtggctacgacggcgaagggagctgagactgtccaggcagccaggttaggccaggaggaccatgtgaatggggccagagggctcccgggctgggcagggaccatgggctgtggctgcagctcacacccggaagatgactggatggaaaacatcgatgtgtgtgagaactgccattatcccatagtcccactggatggcaagggcacgctgctcatccgaaatggctctgaggtgcgggacccactggttacctacgaaggctccaatccgccggcttccccactgcaagacaacctggttatcgctctgcacagctatgagccctctcacgacggagatctgggctttgagaagggggaacagctccgcatcctggagcagagcggcgagtggtggaaggcgcagtccctgaccacgggccaggaaggcttcatccccttcaattttgtggccaaagcgaacagcctggagcccgaaccctggttcttcaagaacctgagccgcaaggacgcggagcggcagctcctggcgcccgggaacactcacggctccttcctcatccgggagagcgagagcaccgcgggatcgttttcactgtcggtccgggacttcgaccagaaccagggagaggtggtgaaacattacaagatccgtaatctggacaacggtggcttctacatctcccctcgaatcacttttcccggcctgcatgaactggtccgccattacaccaatgcttcagatgggctgtgcacacggttgagccgcccctgccagacccagaagccccagaagccgtggtgggaggacgagtgggaggttcccagggagacgctgaagctggtggagcggctgggggctggacagttcggggaggtgtggatggggtactacaacgggcacacgaaggtggcggtgaagagcctgaagcagggcagcatgtccccggacgccttcctggccgaggccaacctcatgaagcagctgcaacaccagcggctggttcggctctacgctgtggtcacccaggagcccatctacatcatcactgaatacatggagaatgggagtctagtggattttctcaagaccccttcaggcatcaagttgaccatcaacaaactcctggacatggcagcccaaattgcagaaggcatggcattcattgaagagcggaattatattcatcgtgaccttcgggctgccaacattctggtgtctgacaccctgagctgcaagattgcagactttggcctagcacgcctcattgaggacaacgagtacacagccagggagggggccaagtttcccattaagtggacagcgccagaagccattaactacgggacattcaccatcaagtcagatgtgtggtcttttgggatcctgctgacggaaattgtcacccacggccgcatcccttacccagggatgaccaacccggaggtgattcagaacctggagcgaggctaccgcatggtgcgccctgacaactgtccagaggagctgtaccaactcatgaggctgtgctggaaggagcgcccagaggaccggcccacctttgactacctgcgcagtgtgctggaggacttcttcacggccacagagggccagtaccagcctcagccttgagaggccttgagaggccctggggttctccccctttctctccagcctgacttggggagatggagttcttgtgccatagtcacatggcctatgcacatatggactctgcacatgaatcccacccacatgtgacacatatgcaccttgtgtctgtacacgtgtcctgtagttgcgtggactctgcacatgtcttgtacatgtgtagcctgtgcatgtatgtcttggacactgtacaaggtacccctttctggctctcccatttcctgagaccacagagagaggggagaagcctgggattgacagaagcttctgcccacctacttttctttcctcagatcatccagaagttcctcaagggccaggactttatctaatacctctgtgtgctcctccttggtgcctggcctggcacacatcaggagttcaataaatgtctgttgatgactgttgta

SEQ ID NO: 62 - protein, 509 aa, Homo sapiens
MGCGCSSHPEDDWMENIDVCENCHYPIVPLDGKGTLLIRNGSEVRDPLVTYEGSNPPASPLQDNLVIALHSYEPSHDGDLGFEKGEQLRILEQSGEWWKAQSLTTGQEGFIPFNFVAKANSLEPEPWFFKNLSRKDAERQLLAPGNTHGSFLIRESESTAGSFSLSVRDFDQNQGEVVKHYKIRNLDNGGFYISPRITFPGLHELVRHYTNASDGLCTRLSRPCQTQKPQKPWWEDEWEVPRETLKLVERLGAGQFGEVWMGYYNGHTKVAVKSLKQGSMSPDAFLAEANLMKQLQHQRLVRLYAVVTQEPIYIITEYMENGSLVDFLKTPSGIKLTINKLLDMAAQIAEGMAFIEERNYIHRDLRAANILVSDTLSCKIADFGLARLIEDNEYTAREGAKFPIKWTAPEAINYGTFTIKSDVWSFGILLTEIVTHGRIPYPGMTNPEVIQNLERGYRMVRPDNCPEELYQLMRLCWKERPEDRPTFDYLRSVLEDFFTATEGQYQPQP

SEQ ID NO: 63 - DNA, 4438 bp, Homo sapiens
ccgtgggacgggcggaggcgcccgagtcccgcttccccggcgcccttccaccccgagcccgactcagcccgcggccacctgcgccccgcccctgtcggccgcgcccgagcccagcgccgcgagccgctccccggcgggctggctcctggccccggaagcgcgagcgttcacttagcggcgagtggctccgtctccgcggacagagcgcgcgccccctggcccggcccgcgaggggctcccggcgcggtccccgagcatttcccgccgggtggagcgggccgagcccggcaggatgaccagccccgcggccgctcaaagccgggagatcgactgtttgagcccggaagcgcagaagctggcggaagcccggctcgctgcaaaacgggcggcccgcgcggaggctcgcgagatccgcatgaaggagctggagcggcagcagaaggaggaagacagtgagcgctactctcgtagatccagaagaaacacatcggcttctgatgaagacgagcgcatgtcagtgggtagtcgtggaagcctgagggtagaagagagaccagaaaaagattttactgagaaggggtctcgtaacatgccgggcctgtctgcagccacgctggcctctctgggtgggacttcctctcggagaggcagcggagacacctccatctccatcgacaccgaggcatccatcagggaaatcaaggactctctagcagaagttgaagagaaatataagaaggctatggtttccaatgctcagctagacaatgaaaagacaaacttcatgtaccaggttgataccctaaaagatatgttgctggagcttgaagaacagctggctgaatctaggcggcagtacgaagagaaaaacaaagaatttgaaagggaaaaacacgcccacagtatactgcaatttcagtttgctgaagtcaaggaggccctgaagcaaagagaggaaatgctcgagaaacatggaataatcctaaattcagaaatagctaccaatggagagacttccgacaccctcaataatgttggataccaaggtcctaccaagatgacaaaagaagagttaaatgccctcaagtcgacaggggatgggaccctaggaagagccagtgaagtggaggtgaaaaatgaaatcgtggcgaatgtggggaaaagagaaatcttgcacaatactgagaaagaacaacacacagaggacacagtgaaggactgtgtggacatagaggtattccctgctggtgagaataccgaggaccagaaatcctctgaagacactgccccattcctaggaaccttagcaggtgctacctatgaggaacaggttcaaagccaaattcttgagagcagttctctccctgaaaacacagtacaggttgagtcaaatgaggtcatgggtgcaccagatgacaggaccagaactccccttgagccatccaactgttggagtgacttagatggtgggaaccacacagagaatgtgggagaggcagcagtgactcaggttgaagagcaggcaggcacagtggcctcgtgtcctttagggcatagtgatgacacagtttatcatgatgacaaatgtatggtagaggtcccccaagagttagagacaagcacagggcatagtttagagaaagaattcaccaaccaggaagcagctgagcccaaggaggttccagcgcacagtacagaagtaggtagggatcacaacgaagaagagggtgaagaaacaggattaagggacgagaaaccaatcaagacagaagttcctggttctccagcaggaactgagggcaactgtcaggaagcgacaggtccaagtacagtagacactcaaaatgaacccttagatatgaaagagcccgatgaagaaaagagtgaccaacagggagaggcattggactcatcgcagaagaagacaaagaacaagaaaaagaaaaacaagaagaaaaaatccccagtacccgtagaaacccttaaagatgttaaaaaagagttaacgtatcagaacacagatttaagtgaaattaaggaagaagagcaggtaaagtctactgacagaaagtcagcagtggaagcccaaaacgaggtgactgaaaatccaaaacagaaaattgcagcagaaagcagtgaaaatgttgattgtccggagaatcctaaaattaagttggatggaaaacttgaccaagaaggtgatgatgtacaaacagcagctgaggaggtactagctgatggagacacattagattttgaggatgacaccgttcaatcatcaggcccgagggctggtggtgaagaattagatgaaggtgttgcaaaagataatgctaaaatagatggtgccactcaaagcagtcctgcagaaccaaagagcgaagacgcagatcgctgcaccctgcccgaacatgaaagtccctcacaggacattagtgatgcctgtgaagcagaaagtacagagaggtgtgagatgtcagaacatccaagtcagaccgtcaggaaagctttagacagcaatagcctagagaacgatgacttgtcggcaccaggaagagagccagggcacttcaatccagaaagcagagaagataccagaggagggaatgagaagggcaaaagcaaagaagactgtaccatgtcctaagctgaggcaggcggcaggcgcggtgcacaggaagtctcagtgtgaaggggtcttttctctccactgccaatgtaagtagaatgttctaaattcatagagaggcactgtatgacaattaccaggtgctctactgctttaagttatagactgttacttgtagatttccatgtaatcattgaggttatcacccagattagaaagacatatttgttatcagtgtacgttctaattgagagcattccagtagtatcaaacaataatgtctactgtttatagtccacttaataaaaatagaggcatttactatttgccttaggctgataggaatgtgggttttcttgaccaaatatatcagcatctaattgaaatgaccaaatagcattcttagacttctgtattatgaatataattgatatttaaattaatgtcttgttcacatatgtgtactttcatatttgattttaaaatgtacattataacctgtatggtattttatttaaaggagataaacagccaaatagcaaataggtcactgaatgataagatttgcaccttagaacaataatcattttaaggataacaagtaaatgtctgaaagcatgaggggctttatttgcctttacctcatatgagtctttgatcttgaaccgatacttttggatctcattgttgatatacctgaatttactttgtaagagattttaacttcacttcatgctgatgatgtatcaaattcattttatagaaagatttaaagtttttttctggaagtgatatatgtcaaattacatttcctactgcagtatttgagcagggacagtcattttttaaatgtttttggccgggcgtggtggctcatgcctgtaatctcagtacattgggaggccaaggcaggtggatcacctgaggtcaagagttcgaggccagcctggccaacatggtgaaaccctgtctctactaaaaatacaaaaaattggccgggcgtgatggtgggcgcctgtaatcccagccactccagaggctgaggcaggagaatcgcttgaacctgcgaggcagagattgcagtgagccaagatcaagccattgtactccagcctggacaacaagagcgaaactctgtctaaaaaaaaaaaaaaaaacacacacacacacaacacaatgttttcacgcctgtaaacctagcacattgggaagccaaggtgggaggattgcttgaggccaggagttcaaggctgcagtgagctatgattgcacactgtactctagcctgggagacagagtgagacactgtctctaaaaaaaaaaaaaaaaaaaaaaaaagtttttgaaccttaaaatactttgtttgaatttctaatcatcattcaaaagagcagtaaaaaatggttacttgttcttgtacaagctactaattagactatagtaggatattttaaagagctgaatcacttttggtattttggtataaatattttcatttgttatgtcccagtatattcttactggaaaattcttgttttgatctgcctgaagaaaatatctgttttctatataaaaaaattttttaaaataattgtaaagttagatttaaaattgtaaaatataaaatcacaaaggaatgtaccttatgaatgttgttgacattttatgaaattatgtggattcatattactgttacaagatagaattgaatgcaaaaagaccaaaacctcaataaaatttgaggaaaacgtgttattatgtaattgaaataaaaacattttataattgtgcaaaaaaaaaaaaaaaaaa

SEQ ID NO: 64 - DNA, 4109 bp, Homo sapiens
cgggccggggcggcgcgagcggctggagcaacgggccccgcggcagctgcgggcgacgcggtcgatggacatgggcacccagggatcggggcgcaagcggctccccaaccgggagcggctcacggcggaggacgacgcgctcaaccagatcgcgcgggaggcggaagcccggctcgctgcaaaacgggcggcccgcgcggaggctcgcgagatccgcatgaaggagctggagcggcagcagaaggagatctatcaggtccaaaagaaatattatgggctggatacaaaatggggtgacatcgagcagtggatggaagacagtgagcgctactctcgtagatccagaagaaacacatcggcttctgatgaagacgagcgcatgtcagtgggtagtcgtggaagcctgaggtcgcagcctgacttggagtatgggggtccttacgcctggacaaatggttatgatggagaattgtatggatcacagtccctgaatagaagatctggcaggccctcctgtctgtacagcgctgcccggccttcggggagttaccgggcgtctgtgttggatgaaggcagcttcggtgggacccgacggggcagcacctccggctcccgtgctccctcggagtacagcggccacctcaactccagctcccgcgcctcctccagggccagctcggcccgggccagccctgtggtagaagagagaccagaaaaagattttactgagaaggggtctcgtaacatgccgggcctgtctgcagccacgctggcctctctgggtgggacttcctctcggagaggcagcggagacacctccatctccatcgacaccgaggcatccatcagggaaatcaaggaactcaatgagttaaaggaccagattcaggatgtagaaggcaaatacatgcagggattgaaagagatgaaggactctctagcagaagttgaagagaaatataagaaggctatggtttccaatgctcagctagacaatgaaaagacaaacttcatgtaccaggttgataccctaaaagatatgttgctggagcttgaagaacagctggctgaatctaggcggcagtacgaagagaaaaacaaagaatttgaaagggaaaaacacgcccacagtatactgcaatttcagtttgctgaagtcaaggaggccctgaagcaaagagaggaaatgctcgaggaaatccgacagctacagcagaaacaggcgagttctatcagggagatttctgatcttcaggaaacaatagagtggaaagacaaaaagataggggcattagagaggcagaaagagttctttgattccgtaaggagtgaacgggatgatcttagagaagaagtagtcatgctgaaagaggaattaaagaaacatggaataatcctaaattcagaaatagctaccaatggagagacttccgacaccctcaataatgttggataccaaggtcctaccaagatgacaaaagaagagttaaatgccctcaagtcgacaggggatgggaccctagatattaggttgaaaaagctggttgatgaacgggaatgcttattggaacagattaagaaactcaaagggcagctggaggagagacagaagattggcaaactagacaatcttcgatctgaagatgatgtcttggaaaacgggacagacatgcatgtaatggacctacaaagggatgccaacagacagatcagcgacctcaaatttaaacttgcaaaatctgagcaagagataactgcattagaacaaaatgtaataaggttagagagtcaagtatcacgttacaaatcagcggctgaaaatgcagaaaaaatagaagatgaacttaaggcagaaaaacggaaactccaaagagagctccgctctgcattggataaaacagaagagctcgaggtgagcaacggccacttagtgaagcgtctggaaaaaatgaaagcaaatcggagtgcactcttgtcccagcagtaaattccagctctgatcaggcaactggttggtgactggagagcattgtttcataggcttttctctgtcctatctgggagcgctgcttcttcccctgccttccgagagacgaagaccgtggcgagcttggcgcttaggggctcccgtgccatggctcaccccagggagccccagcagccaccaggtgcctctgtctgcagacccctggcccgggctggcgccgacgctcagaacctgcaggtacttcataagcacacaggggcctcgagggagctctgtgtctgaccgcacagcagcctctgaatgccgctggaagtgatgatcaaagtaaagattcagttgggacttgagttttttttttttttcatgtgtcttgctgaagattaaggggaaatgttacagtgttgggacttcctttcatggcagaatctacaatttgagcgacttcagtagtatctcttagtctacgcttttcatacacaaaacactgtggaaccacaagccattaccaagcaaaactctttcactggaaacaagggggcagtctagaagtaaaagtgaccttaagaagactctttacaggcaacaaatgaagcttttctaagggatttttgcatcagttcagtcataagaatacttttttccagggtaattaggcaatagcttcactgaaaatgacagcttttcattgcattatttaatccttatatttggaattgaagtcgttaacttcttttaaagaatgtactattagaaaaattaaaaatgaaatgttgagagacttcagcaatgtggttctaatttttttccactgagaaagaagatctttaatttcatattaatggttctgtatattttgggtcatctttttattttttaagaatatcaagtcaattcatttttctttccctatttaaaaaaaaaggtgttttcacagaatgagtgcacttaaaaagtgaagtgaaggaggaggtaacagtagagacgatggcaatatcatcaaggacaaaagtaaaaacgtttagctacctgctgatttttagtgactgttcatatatgttgtatttcaagtatggctggtgaagccagtcagcttttcgggacgttagcaagtggaaactgagtcagtatcatccaaaaccatatctagtcttaacacatggagaatgctggagtgagggttgtgagttcagggtatataatcaagaaaacactcccagcataatgctaggggtcaccagtgtccatcccccagaactgtatggatctaggatatacacagctgcgttgcattaagaaagagatgaaatctctattaaaatacacaagatttttgtatctccttgtgcagaggatatttgccactgcccattgggaagcagacaagttatagggggctgggggccaacactggcaagtaggaaaccacgggtcggacaggtgagcaaaatgtgctggcaggtgggcaccactgggagacccacactgcacacccgggcaccgtatgaacaggaaagaggaaggaagctggacgaagcccctcagggaccctgtgctgaccatgctgggcccaccggcaaaagggagatattcagttccttgtctcatccttaaggtttcttccacaacatctgaatacaagcatgtttaactgggaaaatgtctatgtcatgcgtgaataacaccagcagcaaacactcacacatcacgcagacacggccggcagcatgctgacgcttttaggtatttttcactcatgcaattttcacatattttcactcatttcatttgcacggaaattctatgaggtagatgctgttatcaaatccacattacagatgagggacccagggtccaggaaggtgaactggcagaagtctcccagctggtagaacagggctgcaaggcatcgattcccaggtgtctcacagccctgagaagatggcgttttccctatcagtggctctgaggaagtcaagccttcagtctctacctctcccaccaattcttttggaaacagcaaaccaatgttacacacacttcctaatccagaggaagctagaacacgatttttaaatttatttagtaaaataaaactttttttgcagatgtaacgaaaaaaaaa

SEQ ID NO: 65 - DNA, 4285 bp, Homo sapiens
gcccttccaccccgagcccgactcagcccgcggccacctgcgccccgcccctgtcggccgcgcccgagcccagcgccgcgagccgctccccggcgggctggctcctggccccggaagcgcgagcgttcacttagcggcgagtggctccgtctccgcggacagagcgcgcgccccctggcccggcccgcgaggggctcccggcgcggtccccgagcatttcccgccgggtggagcgggccgagcccggcaggatgaccagccccgcggccgctcaaagccgggagatcgactgtttgagcccggaagcgcagaagctggcggaagcccggctcgctgcaaaacgggcggcccgcgcggaggctcgcgagatccgcatgaaggagctggagcggcagcagaaggaggtagaagagagaccagaaaaagattttactgagaaggggtctcgtaacatgccgggcctgtctgcagccacgctggcctctctgggtgggacttcctctcggagaggcagcggagacacctccatctccatcgacaccgaggcatccatcagggaaatcaaggactctctagcagaagttgaagagaaatataagaaggctatggtttccaatgctcagctagacaatgaaaagacaaacttcatgtaccaggttgataccctaaaagatatgttgctggagcttgaagaacagctggctgaatctaggcggcagtacgaagagaaaaacaaagaatttgaaagggaaaaacacgcccacagtatactgcaatttcagtttgctgaagtcaaggaggccctgaagcaaagagaggaaatgctcgagaaacatggaataatcctaaattcagaaatagctaccaatggagagacttccgacaccctcaataatgttggataccaaggtcctaccaagatgacaaaagaagagttaaatgccctcaagtcgacaggggatgggaccctaggaagagccagtgaagtggaggtgaaaaatgaaatcgtggcgaatgtggggaaaagagaaatcttgcacaatactgagaaagaacaacacacagaggacacagtgaaggactgtgtggacatagaggtattccctgctggtgagaataccgaggaccagaaatcctctgaagacactgccccattcctaggaaccttagcaggtgctacctatgaggaacaggttcaaagccaaattcttgagagcagttctctccctgaaaacacagtacaggttgagtcaaatgaggtcatgggtgcaccagatgacaggaccagaactccccttgagccatccaactgttggagtgacttagatggtgggaaccacacagagaatgtgggagaggcagcagtgactcaggttgaagagcaggcaggcacagtggcctcgtgtcctttagggcatagtgatgacacagtttatcatgatgacaaatgtatggtagaggtcccccaagagttagagacaagcacagggcatagtttagagaaagaattcaccaaccaggaagcagctgagcccaaggaggttccagcgcacagtacagaagtaggtagggatcacaacgaagaagagggtgaagaaacaggattaagggacgagaaaccaatcaagacagaagttcctggttctccagcaggaactgagggcaactgtcaggaagcgacaggtccaagtacagtagacactcaaaatgaacccttagatatgaaagagcccgatgaagaaaagagtgaccaacagggagaggcattggactcatcgcagaagaagacaaagaacaagaaaaagaaaaacaagaagaaaaaatccccagtacccgtagaaacccttaaagatgttaaaaaagagttaacgtatcagaacacagatttaagtgaaattaaggaagaagagcaggtaaagtctactgacagaaagtcagcagtggaagcccaaaacgaggtgactgaaaatccaaaacagaaaattgcagcagaaagcagtgaaaatgttgattgtccggagaatcctaaaattaagttggatggaaaacttgaccaagaaggtgatgatgtacaaacagcagctgaggaggtactagctgatggagacacattagattttgaggatgacaccgttcaatcatcaggcccgagggctggtggtgaagaattagatgaaggtgttgcaaaagataatgctaaaatagatggtgccactcaaagcagtcctgcagaaccaaagagcgaagacgcagatcgctgcaccctgcccgaacatgaaagtccctcacaggacattagtgatgcctgtgaagcagaaagtacagagaggtgtgagatgtcagaacatccaagtcagaccgtcaggaaagctttagacagcaatagcctagagaacgatgacttgtcggcaccaggaagagagccagggcacttcaatccagaaagcagagaagataccagaggagggaatgagaagggcaaaagcaaagaagactgtaccatgtcctaagctgaggcaggcggcaggcgcggtgcacaggaagtctcagtgtgaaggggtcttttctctccactgccaatgtaagtagaatgttctaaattcatagagaggcactgtatgacaattaccaggtgctctactgctttaagttatagactgttacttgtagatttccatgtaatcattgaggttatcacccagattagaaagacatatttgttatcagtgtacgttctaattgagagcattccagtagtatcaaacaataatgtctactgtttatagtccacttaataaaaatagaggcatttactatttgccttaggctgataggaatgtgggttttcttgaccaaatatatcagcatctaattgaaatgaccaaatagcattcttagacttctgtattatgaatataattgatatttaaattaatgtcttgttcacatatgtgtactttcatatttgattttaaaatgtacattataacctgtatggtattttatttaaaggagataaacagccaaatagcaaataggtcactgaatgataagatttgcaccttagaacaataatcattttaaggataacaagtaaatgtctgaaagcatgaggggctttatttgcctttacctcatatgagtctttgatcttgaaccgatacttttggatctcattgttgatatacctgaatttactttgtaagagattttaacttcacttcatgctgatgatgtatcaaattcattttatagaaagatttaaagtttttttctggaagtgatatatgtcaaattacatttcctactgcagtatttgagcagggacagtcattttttaaatgtttttggccgggcgtggtggctcatgcctgtaatctcagtacattgggaggccaaggcaggtggatcacctgaggtcaagagttcgaggccagcctggccaacatggtgaaaccctgtctctactaaaaatacaaaaaattggccgggcgtgatggtgggcgcctgtaatcccagccactccagaggctgaggcaggagaatcgcttgaacctgcgaggcagagattgcagtgagccaagatcaagccattgtactccagcctggacaacaagagcgaaactctgtctaaaaaaaaaaaaaaaaacacacacacacacaacacaatgttttcacgcctgtaaacctagcacattgggaagccaaggtgggaggattgcttgaggccaggagttcaaggctgcagtgagctatgattgcacactgtactctagcctgggagacagagtgagacactgtctctaaaaaaaaaaaaaaaaaaaaaaaaagtttttgaaccttaaaatactttgtttgaatttctaatcatcattcaaaagagcagtaaaaaatggttacttgttcttgtacaagctactaattagactatagtaggatattttaaagagctgaatcacttttggtattttggtataaatattttcatttgttatgtcccagtatattcttactggaaaattcttgttttgatctgcctgaagaaaatatctgttttctatataaaaaaattttttaaaataattgtaaagttagatttaaaattgtaaaatataaaatcacaaaggaatgtaccttatgaatgttgttgacattttatgaaattatgtggattcatattactgttacaagatagaattgaatgcaaaaagaccaaaacctcaataaaatttgaggaaaacgtgttattatgtaattgaaataaaaacattttataattgtgcaa

SEQ ID NO: 66 - DNA, 4453 bp, Homo sapiens
gcccttccaccccgagcccgactcagcccgcggccacctgcgccccgcccctgtcggccgcgcccgagcccagcgccgcgagccgctccccggcgggctggctcctggccccggaagcgcgagcgttcacttagcggcgagtggctccgtctccgcggacagagcgcgcgccccctggcccggcccgcgaggggctcccggcgcggtccccgagcatttcccgccgggtggagcgggccgagcccggcaggatgaccagccccgcggccgctcaaagccgggagatcgactgtttgagcccggaagcgcagaagctggcggaagcccggctcgctgcaaaacgggcggcccgcgcggaggctcgcgagatccgcatgaaggagctggagcggcagcagaaggaggaagacagtgagcgctactctcgtagatccagaagaaacacatcggcttctgatgaagacgagcgcatgtcagtgggtagtcgtggaagcctgagggtagaagagagaccagaaaaagattttactgagaaggggtctcgtaacatgccgggcctgtctgcagccacgctggcctctctgggtgggacttcctctcggagaggcagcggagacacctccatctccatcgacaccgaggcatccatcagggaaatcaaggaactcaatgagttaaaggaccagattcaggatgtagaaggcaaatacatgcagggattgaaagagatgaaggactctctagcagaagttgaagagaaatataagaaggctatggtttccaatgctcagctagacaatgaaaagacaaacttcatgtaccaggttgataccctaaaagatatgttgctggagcttgaagaacagctggctgaatctaggcggcagtacgaagagaaaaacaaagaatttgaaagggaaaaacacgcccacagtatactgcaatttcagtttgctgaagtcaaggaggccctgaagcaaagagaggaaatgctcgagaaacatggaataatcctaaattcagaaatagctaccaatggagagacttccgacaccctcaataatgttggataccaaggtcctaccaagatgacaaaagaagagttaaatgccctcaagtcgacaggggatgggaccctaggaagagccagtgaagtggaggtgaaaaatgaaatcgtggcgaatgtggggaaaagagaaatcttgcacaatactgagaaagaacaacacacagaggacacagtgaaggactgtgtggacatagaggtattccctgctggtgagaataccgaggaccagaaatcctctgaagacactgccccattcctaggaaccttagcaggtgctacctatgaggaacaggttcaaagccaaattcttgagagcagttctctccctgaaaacacagtacaggttgagtcaaatgaggtcatgggtgcaccagatgacaggaccagaactccccttgagccatccaactgttggagtgacttagatggtgggaaccacacagagaatgtgggagaggcagcagtgactcaggttgaagagcaggcaggcacagtggcctcgtgtcctttagggcatagtgatgacacagtttatcatgatgacaaatgtatggtagaggtcccccaagagttagagacaagcacagggcatagtttagagaaagaattcaccaaccaggaagcagctgagcccaaggaggttccagcgcacagtacagaagtaggtagggatcacaacgaagaagagggtgaagaaacaggattaagggacgagaaaccaatcaagacagaagttcctggttctccagcaggaactgagggcaactgtcaggaagcgacaggtccaagtacagtagacactcaaaatgaacccttagatatgaaagagcccgatgaagaaaagagtgaccaacagggagaggcattggactcatcgcagaagaagacaaagaacaagaaaaagaaaaacaagaagaaaaaatccccagtacccgtagaaacccttaaagatgttaaaaaagagttaacgtatcagaacacagatttaagtgaaattaaggaagaagagcaggtaaagtctactgacagaaagtcagcagtggaagcccaaaacgaggtgactgaaaatccaaaacagaaaattgcagcagaaagcagtgaaaatgttgattgtccggagaatcctaaaattaagttggatggaaaacttgaccaagaaggtgatgatgtacaaacagcagctgaggaggtactagctgatggagacacattagattttgaggatgacaccgttcaatcatcaggcccgagggctggtggtgaagaattagatgaaggtgttgcaaaagataatgctaaaatagatggtgccactcaaagcagtcctgcagaaccaaagagcgaagacgcagatcgctgcaccctgcccgaacatgaaagtccctcacaggacattagtgatgcctgtgaagcagaaagtacagagaggtgtgagatgtcagaacatccaagtcagaccgtcaggaaagctttagacagcaatagcctagagaacgatgacttgtcggcaccaggaagagagccagggcacttcaatccagaaagcagagaagataccagaggagggaatgagaagggcaaaagcaaagaagactgtaccatgtcctaagctgaggcaggcggcaggcgcggtgcacaggaagtctcagtgtgaaggggtcttttctctccactgccaatgtaagtagaatgttctaaattcatagagaggcactgtatgacaattaccaggtgctctactgctttaagttatagactgttacttgtagatttccatgtaatcattgaggttatcacccagattagaaagacatatttgttatcagtgtacgttctaattgagagcattccagtagtatcaaacaataatgtctactgtttatagtccacttaataaaaatagaggcatttactatttgccttaggctgataggaatgtgggttttcttgaccaaatatatcagcatctaattgaaatgaccaaatagcattcttagacttctgtattatgaatataattgatatttaaattaatgtcttgttcacatatgtgtactttcatatttgattttaaaatgtacattataacctgtatggtattttatttaaaggagataaacagccaaatagcaaataggtcactgaatgataagatttgcaccttagaacaataatcattttaaggataacaagtaaatgtctgaaagcatgaggggctttatttgcctttacctcatatgagtctttgatcttgaaccgatacttttggatctcattgttgatatacctgaatttactttgtaagagattttaacttcacttcatgctgatgatgtatcaaattcattttatagaaagatttaaagtttttttctggaagtgatatatgtcaaattacatttcctactgcagtatttgagcagggacagtcattttttaaatgtttttggccgggcgtggtggctcatgcctgtaatctcagtacattgggaggccaaggcaggtggatcacctgaggtcaagagttcgaggccagcctggccaacatggtgaaaccctgtctctactaaaaatacaaaaaattggccgggcgtgatggtgggcgcctgtaatcccagccactccagaggctgaggcaggagaatcgcttgaacctgcgaggcagagattgcagtgagccaagatcaagccattgtactccagcctggacaacaagagcgaaactctgtctaaaaaaaaaaaaaaaaacacacacacacacaacacaatgttttcacgcctgtaaacctagcacattgggaagccaaggtgggaggattgcttgaggccaggagttcaaggctgcagtgagctatgattgcacactgtactctagcctgggagacagagtgagacactgtctctaaaaaaaaaaaaaaaaaaaaaaaaagtttttgaaccttaaaatactttgtttgaatttctaatcatcattcaaaagagcagtaaaaaatggttacttgttcttgtacaagctactaattagactatagtaggatattttaaagagctgaatcacttttggtattttggtataaatattttcatttgttatgtcccagtatattcttactggaaaattcttgttttgatctgcctgaagaaaatatctgttttctatataaaaaaattttttaaaataattgtaaagttagatttaaaattgtaaaatataaaatcacaaaggaatgtaccttatgaatgttgttgacattttatgaaattatgtggattcatattactgttacaagatagaattgaatgcaaaaagaccaaaacctcaataaaatttgaggaaaacgtgttattatgtaattgaaataaaaacattttataattgtgcaa

SEQ ID NO: 67 - protein, 784 aa, Homo sapiens
MTSPAAAQSREIDCLSPEAQKLAEARLAAKRAARAEAREIRMKELERQQKEEDSERYSRRSRRNTSASDEDERMSVGSRGSLRVEERPEKDFTEKGSRNMPGLSAATLASLGGTSSRRGSGDTSISIDTEASIREIKDSLAEVEEKYKKAMVSNAQLDNEKTNFMYQVDTLKDMLLELEEQLAESRRQYEEKNKEFEREKHAHSILQFQFAEVKEALKQREEMLEKHGIILNSEIATNGETSDTLNNVGYQGPTKMTKEELNALKSTGDGTLGRASEVEVKNEIVANVGKREILHNTEKEQHTEDTVKDCVDIEVFPAGENTEDQKSSEDTAPFLGTLAGATYEEQVQSQILESSSLPENTVQVESNEVMGAPDDRTRTPLEPSNCWSDLDGGNHTENVGEAAVTQVEEQAGTVASCPLGHSDDTVYHDDKCMVEVPQELETSTGHSLEKEFTNQEAAEPKEVPAHSTEVGRDHNEEEGEETGLRDEKPIKTEVPGSPAGTEGNCQEATGPSTVDTQNEPLDMKEPDEEKSDQQGEALDSSQKKTKNKKKKNKKKKSPVPVETLKDVKKELTYQNTDLSEIKEEEQVKSTDRKSAVEAQNEVTENPKQKIAAESSENVDCPENPKIKLDGKLDQEGDDVQTAAEEVLADGDTLDFEDDTVQSSGPRAGGEELDEGVAKDNAKIDGATQSSPAEPKSEDADRCTLPEHESPSQDISDACEAESTERCEMSEHPSQTVRKALDSNSLENDDLSAPGREPGHFNPESREDTRGGNEKGKSKEDCTMS

SEQ ID NO: 68 - protein, 640 aa, Homo sapiens
MDMGTQGSGRKRLPNRERLTAEDDALNQIAREAEARLAAKRAARAEAREIRMKELERQQKEIYQVQKKYYGLDTKWGDIEQWMEDSERYSRRSRRNTSASDEDERMSVGSRGSLRSQPDLEYGGPYAWTNGYDGELYGSQSLNRRSGRPSCLYSAARPSGSYRASVLDEGSFGGTRRGSTSGSRAPSEYSGHLNSSSRASSRASSARASPVVEERPEKDFTEKGSRNMPGLSAATLASLGGTSSRRGSGDTSISIDTEASIREIKELNELKDQIQDVEGKYMQGLKEMKDSLAEVEEKYKKAMVSNAQLDNEKTNFMYQVDTLKDMLLELEEQLAESRRQYEEKNKEFEREKHAHSILQFQFAEVKEALKQREEMLEEIRQLQQKQASSIREISDLQETIEWKDKKIGALERQKEFFDSVRSERDDLREEVVMLKEELKKHGIILNSEIATNGETSDTLNNVGYQGPTKMTKEELNALKSTGDGTLDIRLKKLVDERECLLEQIKKLKGQLEERQKIGKLDNLRSEDDVLENGTDMHVMDLQRDANRQISDLKFKLAKSEQEITALEQNVIRLESQVSRYKSAAENAEKIEDELKAEKRKLQRELRSALDKTEELEVSNGHLVKRLEKMKANRSALLSQQ

SEQ ID NO: 69 - protein, 752 aa, Homo sapiens
MTSPAAAQSREIDCLSPEAQKLAEARLAAKRAARAEAREIRMKELERQQKEVEERPEKDFTEKGSRNMPGLSAATLASLGGTSSRRGSGDTSISIDTEASIREIKDSLAEVEEKYKKAMVSNAQLDNEKTNFMYQVDTLKDMLLELEEQLAESRRQYEEKNKEFEREKHAHSILQFQFAEVKEALKQREEMLEKHGIILNSEIATNGETSDTLNNVGYQGPTKMTKEELNALKSTGDGTLGRASEVEVKNEIVANVGKREILHNTEKEQHTEDTVKDCVDIEVFPAGENTEDQKSSEDTAPFLGTLAGATYEEQVQSQILESSSLPENTVQVESNEVMGAPDDRTRTPLEPSNCWSDLDGGNHTENVGEAAVTQVEEQAGTVASCPLGHSDDTVYHDDKCMVEVPQELETSTGHSLEKEFTNQEAAEPKEVPAHSTEVGRDHNEEEGEETGLRDEKPIKTEVPGSPAGTEGNCQEATGPSTVDTQNEPLDMKEPDEEKSDQQGEALDSSQKKTKNKKKKNKKKKSPVPVETLKDVKKELTYQNTDLSEIKEEEQVKSTDRKSAVEAQNEVTENPKQKIAAESSENVDCPENPKIKLDGKLDQEGDDVQTAAEEVLADGDTLDFEDDTVQSSGPRAGGEELDEGVAKDNAKIDGATQSSPAEPKSEDADRCTLPEHESPSQDISDACEAESTERCEMSEHPSQTVRKALDSNSLENDDLSAPGREPGHFNPESREDTRGGNEKGKSKEDCTMS

SEQ ID NO: 70 - protein, 808 aa, Homo sapiens
MTSPAAAQSREIDCLSPEAQKLAEARLAAKRAARAEAREIRMKELERQQKEEDSERYSRRSRRNTSASDEDERMSVGSRGSLRVEERPEKDFTEKGSRNMPGLSAATLASLGGTSSRRGSGDTSISIDTEASIREIKELNELKDQIQDVEGKYMQGLKEMKDSLAEVEEKYKKAMVSNAQLDNEKTNFMYQVDTLKDMLLELEEQLAESRRQYEEKNKEFEREKHAHSILQFQFAEVKEALKQREEMLEKHGIILNSEIATNGETSDTLNNVGYQGPTKMTKEELNALKSTGDGTLGRASEVEVKNEIVANVGKREILHNTEKEQHTEDTVKDCVDIEVFPAGENTEDQKSSEDTAPFLGTLAGATYEEQVQSQILESSSLPENTVQVESNEVMGAPDDRTRTPLEPSNCWSDLDGGNHTENVGEAAVTQVEEQAGTVASCPLGHSDDTVYHDDKCMVEVPQELETSTGHSLEKEFTNQEAAEPKEVPAHSTEVGRDHNEEEGEETGLRDEKPIKTEVPGSPAGTEGNCQEATGPSTVDTQNEPLDMKEPDEEKSDQQGEALDSSQKKTKNKKKKNKKKKSPVPVETLKDVKKELTYQNTDLSEIKEEEQVKSTDRKSAVEAQNEVTENPKQKIAAESSENVDCPENPKIKLDGKLDQEGDDVQTAAEEVLADGDTLDFEDDTVQSSGPRAGGEELDEGVAKDNAKIDGATQSSPAEPKSEDADRCTLPEHESPSQDISDACEAESTERCEMSEHPSQTVRKALDSNSLENDDLSAPGREPGHFNPESREDTRGGNEKGKSKEDCTMS

SEQ ID NO: 71 - DNA, 2691 bp, Homo sapiens
aatgcgacccgaccgcgctgaggctccaggaccgcccgccatggctgcaggaggtcccggcgcggggtctgcggccccggtctcctccacatcctcccttcccctggctgctctcaacatgcgagtgcggcgccgcctgtctctgttcttgaacgtgcggacacaggtggcggccgactggaccgcgctggcggaggagatggactttgagtacttggagatccggcaactggagacacaagcggaccccactggcaggctgctggacgcctggcagggacgccctggcgcctctgtaggccgactgctcgagctgcttaccaagctgggccgcgacgacgtgctgctggagctgggacccagcattgaggaggattgccaaaagtatatcttgaagcagcagcaggaggaggctgagaagcctttacaggtggccgctgtagacagcagtgtcccacggacagcagagctggcgggcatcaccacacttgatgaccccctggggcatatgcctgagcgtttcgatgccttcatctgctattgccccagcgacatccagtttgtgcaggagatgatccggcaactggaacagacaaactatcgactgaagttgtgtgtgtctgaccgcgatgtcctgcctggcacctgtgtctggtctattgctagtgagctcatcgaaaagaggttggctagaaggccacggggtgggtgccgccggatggtggtggttgtctctgatgattacctgcagagcaaggaatgtgacttccagaccaaatttgcactcagcctctctccaggtgcccatcagaagcgactgatccccatcaagtacaaggcaatgaagaaagagttccccagcatcctgaggttcatcactgtctgcgactacaccaacccctgcaccaaatcttggttctggactcgccttgccaaggccttgtccctgccctgaagactgttctgaggccctgggtgtgtgtgtatctgtctgcctgtccatgtacttctgccctgcctcctcctttcgttgtaggaggaatctgtgctctacttacctctcaattcctggagatgccaacttcacagacacgtctgcagcagctggacatcacatttcatgtcctgcatggaaccagtggctgtgagtggcatgtccacttgctggattatcagccaggacactatagaacaggaccagctgagactaagaaggaccagcagagccagctcagctctgagccattcacacatcttcaccctcagtttcctcacttgaggagtgggatggggagaacagagagtagctgtgtttgaatccctgtaggaaatggtgaagcatagctctgggtctcctgggggagaccaggcttggctgcgggagagctggctgttgctggactacatgctggccactgctgtgaccacgacactgctggggcagcttcttccacagtgatgcctactgatgcttcagtgcctctgcacaccgcccattccacttcctccttccccacagggcaggtggggaagcagtttggcccagcccaaggagaccccaccttgagccttatttcctaatgggtccacctctcatctgcatctttcacacctcccagcttctgcccaaccttcagcagtgacaagtccccaagagactcgcctgagcagcttgggctgcttttcatttccacctgtcaggatgcctgtggtcatgctctcagctccacctggcatgagaagggatcctggcctctggcatattcatcaagtatgagttctggggatgagtcactgtaatgatgtgagcagggagccttcctccctgggccacctgcagagagctttcccaccaactttgtaccttgattgccttacaaagttatttgtttacaaacagcgaccatataaaagcctcctgccccaaagcttgtgggcacatgggcacatacagactcacatacagacacacacatatatgtacagacatgtactctcacacacacaggcaccagcatacacacgtttttctaggtacagctcccaggaacagctaggtgggaaagtcccatcactgagggagcctaaccatgtccctgaacaaaaattgggcactcatctattccttttctcttgtgtccctactcattgaaaccaaactctggaaaggacccaatgtaccagtatttatacctctaatgaagcacagagagaggaagagagctgcttaaactcacacaacaatgaactgcagacacagctgttctctccctctctccttcccagagcaatttatactttaccctcaggctgtcctctggggagaaggtgccatggtcttaggtgtctgtgccccaggacagaccctaggaccctaaatccaatagaaaatgcatatctttgctccactttcagccaggctggagcaaggtaccttttcttaggatcttgggagggaatggatgcccctctctgcatgatcttgttgaggcatttagctgccatgcacctgtccccctttaatactgggcattttaaagccatctcaagaggcatcttctacatgttttgtacgcattaaaataatttcaaagatatctgagaaaagccgatatttgccattcttcctatatcctggaatatatcttgcatcctgagtttataataataaataatattctaccttggaaa

SEQ ID NO: 72 - DNA, 2727 bp, Homo sapiens
agattcctacttcttacgccccccacatcacccgcctcgagacctcaagggtagaggtgggcacccccgcctccgcacttttgctcggggctccagattgtagggcagggcggcgcttctcggaaagcgaaagccggcggggcggggcgggtgccgcaggagaaagaggaagcgctggcagacaatgcgacccgaccgcgctgaggctccaggaccgcccgccatggctgcaggaggtcccggcgcggggtctgcggccccggtctcctccacatcctcccttcccctggctgctctcaacatgcgagtgcggcgccgcctgtctctgttcttgaacgtgcggacacaggtggcggccgactggaccgcgctggcggaggagatggactttgagtacttggagatccggcaactggagacacaagcggaccccactggcaggctgctggacgcctggcagggacgccctggcgcctctgtaggccgactgctcgagctgcttaccaagctgggccgcgacgacgtgctgctggagctgggacccagcattgggcatatgcctgagcgtttcgatgccttcatctgctattgccccagcgacatccagtttgtgcaggagatgatccggcaactggaacagacaaactatcgactgaagttgtgtgtgtctgaccgcgatgtcctgcctggcacctgtgtctggtctattgctagtgagctcatcgaaaagaggtgccgccggatggtggtggttgtctctgatgattacctgcagagcaaggaatgtgacttccagaccaaatttgcactcagcctctctccaggtgcccatcagaagcgactgatccccatcaagtacaaggcaatgaagaaagagttccccagcatcctgaggttcatcactgtctgcgactacaccaacccctgcaccaaatcttggttctggactcgccttgccaaggccttgtccctgccctgaagactgttctgaggccctgggtgtgtgtgtatctgtctgcctgtccatgtacttctgccctgcctcctcctttcgttgtaggaggaatctgtgctctacttacctctcaattcctggagatgccaacttcacagacacgtctgcagcagctggacatcacatttcatgtcctgcatggaaccagtggctgtgagtggcatgtccacttgctggattatcagccaggacactatagaacaggaccagctgagactaagaaggaccagcagagccagctcagctctgagccattcacacatcttcaccctcagtttcctcacttgaggagtgggatggggagaacagagagtagctgtgtttgaatccctgtaggaaatggtgaagcatagctctgggtctcctgggggagaccaggcttggctgcgggagagctggctgttgctggactacatgctggccactgctgtgaccacgacactgctggggcagcttcttccacagtgatgcctactgatgcttcagtgcctctgcacaccgcccattccacttcctccttccccacagggcaggtggggaagcagtttggcccagcccaaggagaccccaccttgagccttatttcctaatgggtccacctctcatctgcatctttcacacctcccagcttctgcccaaccttcagcagtgacaagtccccaagagactcgcctgagcagcttgggctgcttttcatttccacctgtcaggatgcctgtggtcatgctctcagctccacctggcatgagaagggatcctggcctctggcatattcatcaagtatgagttctggggatgagtcactgtaatgatgtgagcagggagccttcctccctgggccacctgcagagagctttcccaccaactttgtaccttgattgccttacaaagttatttgtttacaaacagcgaccatataaaagcctcctgccccaaagcttgtgggcacatgggcacatacagactcacatacagacacacacatatatgtacagacatgtactctcacacacacaggcaccagcatacacacgtttttctaggtacagctcccaggaacagctaggtgggaaagtcccatcactgagggagcctaaccatgtccctgaacaaaaattgggcactcatctattccttttctcttgtgtccctactcattgaaaccaaactctggaaaggacccaatgtaccagtatttatacctctaatgaagcacagagagaggaagagagctgcttaaactcacacaacaatgaactgcagacacagctgttctctccctctctccttcccagagcaatttatactttaccctcaggctgtcctctggggagaaggtgccatggtcttaggtgtctgtgccccaggacagaccctaggaccctaaatccaatagaaaatgcatatctttgctccactttcagccaggctggagcaaggtaccttttcttaggatcttgggagggaatggatgcccctctctgcatgatcttgttgaggcatttagctgccatgcacctgtccccctttaatactgggcattttaaagccatctcaagaggcatcttctacatgttttgtacgcattaaaataatttcaaagatatctgagaaaagccgatatttgccattcttcctatatcctggaatatatcttgcatcctgagtttataataataaataatattctaccttggaaaaaaaaaaaaaaa

SEQ ID NO: 73 - DNA, 2486 bp, Homo sapiens
aatgcgacccgaccgcgctgaggctccaggaccgcccgccatggctgcaggaggtcccggcgcggggtctgcggccccggtctcctccacatcctcccttcccctggctgctctcaacatgcgagtgcggcgccgcctgtctctgttcttgaacgtgcggacacaggtggcggccgactggaccgcgctggcggaggagatggactttgagtacttggagatccggcaactggagacacaagcggaccccactggcaggctgctggacgcctggcagggacgccctggcgcctctgtaggccgactgctcgagctgcttaccaagctgggccgcgacgacgtgctgctggagctgggacccagcattgaggaggattgccaaaagtatatcttgaagcagcagcaggaggaggctgagaagcctttacaggtggccgctgtagacagcagtgtcccacggacagcagagctggcgggcatcaccacacttgatgaccccctgggtgccgccggatggtggtggttgtctctgatgattacctgcagagcaaggaatgtgacttccagaccaaatttgcactcagcctctctccaggtgcccatcagaagcgactgatccccatcaagtacaaggcaatgaagaaagagttccccagcatcctgaggttcatcactgtctgcgactacaccaacccctgcaccaaatcttggttctggactcgccttgccaaggccttgtccctgccctgaagactgttctgaggccctgggtgtgtgtgtatctgtctgcctgtccatgtacttctgccctgcctcctcctttcgttgtaggaggaatctgtgctctacttacctctcaattcctggagatgccaacttcacagacacgtctgcagcagctggacatcacatttcatgtcctgcatggaaccagtggctgtgagtggcatgtccacttgctggattatcagccaggacactatagaacaggaccagctgagactaagaaggaccagcagagccagctcagctctgagccattcacacatcttcaccctcagtttcctcacttgaggagtgggatggggagaacagagagtagctgtgtttgaatccctgtaggaaatggtgaagcatagctctgggtctcctgggggagaccaggcttggctgcgggagagctggctgttgctggactacatgctggccactgctgtgaccacgacactgctggggcagcttcttccacagtgatgcctactgatgcttcagtgcctctgcacaccgcccattccacttcctccttccccacagggcaggtggggaagcagtttggcccagcccaaggagaccccaccttgagccttatttcctaatgggtccacctctcatctgcatctttcacacctcccagcttctgcccaaccttcagcagtgacaagtccccaagagactcgcctgagcagcttgggctgcttttcatttccacctgtcaggatgcctgtggtcatgctctcagctccacctggcatgagaagggatcctggcctctggcatattcatcaagtatgagttctggggatgagtcactgtaatgatgtgagcagggagccttcctccctgggccacctgcagagagctttcccaccaactttgtaccttgattgccttacaaagttatttgtttacaaacagcgaccatataaaagcctcctgccccaaagcttgtgggcacatgggcacatacagactcacatacagacacacacatatatgtacagacatgtactctcacacacacaggcaccagcatacacacgtttttctaggtacagctcccaggaacagctaggtgggaaagtcccatcactgagggagcctaaccatgtccctgaacaaaaattgggcactcatctattccttttctcttgtgtccctactcattgaaaccaaactctggaaaggacccaatgtaccagtatttatacctctaatgaagcacagagagaggaagagagctgcttaaactcacacaacaatgaactgcagacacagctgttctctccctctctccttcccagagcaatttatactttaccctcaggctgtcctctggggagaaggtgccatggtcttaggtgtctgtgccccaggacagaccctaggaccctaaatccaatagaaaatgcatatctttgctccactttcagccaggctggagcaaggtaccttttcttaggatcttgggagggaatggatgcccctctctgcatgatcttgttgaggcatttagctgccatgcacctgtccccctttaatactgggcattttaaagccatctcaagaggcatcttctacatgttttgtacgcattaaaataatttcaaagatatctgagaaaagccgatatttgccattcttcctatatcctggaatatatcttgcatcctgagtttataataataaataatattctaccttggaaa

SEQ ID NO: 74 - DNA, 2351 bp, Homo sapiens
aatgcgacccgaccgcgctgaggctccaggaccgcccgccatggctgcaggaggtcccggcgcggggtctgcggccccggtctcctccacatcctcccttcccctggctgctctcaacatgcgagtgcggcgccgcctgtctctgttcttgaacgtgcggacacaggtggcggccgactggaccgcgctggcggaggagatggactttgagtacttggagatccggcaactggagacacaagcggaccccactggcaggctgctggacgcctggcagggacgccctggcgcctctgtaggccgactgctcgagctgcttaccaagctgggccgcgacgacgtgctgctggagctgggacccagcattggtgccgccggatggtggtggttgtctctgatgattacctgcagagcaaggaatgtgacttccagaccaaatttgcactcagcctctctccaggtgcccatcagaagcgactgatccccatcaagtacaaggcaatgaagaaagagttccccagcatcctgaggttcatcactgtctgcgactacaccaacccctgcaccaaatcttggttctggactcgccttgccaaggccttgtccctgccctgaagactgttctgaggccctgggtgtgtgtgtatctgtctgcctgtccatgtacttctgccctgcctcctcctttcgttgtaggaggaatctgtgctctacttacctctcaattcctggagatgccaacttcacagacacgtctgcagcagctggacatcacatttcatgtcctgcatggaaccagtggctgtgagtggcatgtccacttgctggattatcagccaggacactatagaacaggaccagctgagactaagaaggaccagcagagccagctcagctctgagccattcacacatcttcaccctcagtttcctcacttgaggagtgggatggggagaacagagagtagctgtgtttgaatccctgtaggaaatggtgaagcatagctctgggtctcctgggggagaccaggcttggctgcgggagagctggctgttgctggactacatgctggccactgctgtgaccacgacactgctggggcagcttcttccacagtgatgcctactgatgcttcagtgcctctgcacaccgcccattccacttcctccttccccacagggcaggtggggaagcagtttggcccagcccaaggagaccccaccttgagccttatttcctaatgggtccacctctcatctgcatctttcacacctcccagcttctgcccaaccttcagcagtgacaagtccccaagagactcgcctgagcagcttgggctgcttttcatttccacctgtcaggatgcctgtggtcatgctctcagctccacctggcatgagaagggatcctggcctctggcatattcatcaagtatgagttctggggatgagtcactgtaatgatgtgagcagggagccttcctccctgggccacctgcagagagctttcccaccaactttgtaccttgattgccttacaaagttatttgtttacaaacagcgaccatataaaagcctcctgccccaaagcttgtgggcacatgggcacatacagactcacatacagacacacacatatatgtacagacatgtactctcacacacacaggcaccagcatacacacgtttttctaggtacagctcccaggaacagctaggtgggaaagtcccatcactgagggagcctaaccatgtccctgaacaaaaattgggcactcatctattccttttctcttgtgtccctactcattgaaaccaaactctggaaaggacccaatgtaccagtatttatacctctaatgaagcacagagagaggaagagagctgcttaaactcacacaacaatgaactgcagacacagctgttctctccctctctccttcccagagcaatttatactttaccctcaggctgtcctctggggagaaggtgccatggtcttaggtgtctgtgccccaggacagaccctaggaccctaaatccaatagaaaatgcatatctttgctccactttcagccaggctggagcaaggtaccttttcttaggatcttgggagggaatggatgcccctctctgcatgatcttgttgaggcatttagctgccatgcacctgtccccctttaatactgggcattttaaagccatctcaagaggcatcttctacatgttttgtacgcattaaaataatttcaaagatatctgagaaaagccgatatttgccattcttcctatatcctggaatatatcttgcatcctgagtttataataataaataatattctaccttggaaa

SEQ ID NO: 75 - DNA, 2862 bp, Homo sapiens
agattcctacttcttacgccccccacatcacccgcctcgagacctcaagggtagaggtgggcacccccgcctccgcacttttgctcggggctccagattgtagggcagggcggcgcttctcggaaagcgaaagccggcggggcggggcgggtgccgcaggagaaagaggaagcgctggcagacaatgcgacccgaccgcgctgaggctccaggaccgcccgccatggctgcaggaggtcccggcgcggggtctgcggccccggtctcctccacatcctcccttcccctggctgctctcaacatgcgagtgcggcgccgcctgtctctgttcttgaacgtgcggacacaggtggcggccgactggaccgcgctggcggaggagatggactttgagtacttggagatccggcaactggagacacaagcggaccccactggcaggctgctggacgcctggcagggacgccctggcgcctctgtaggccgactgctcgagctgcttaccaagctgggccgcgacgacgtgctgctggagctgggacccagcattgaggaggattgccaaaagtatatcttgaagcagcagcaggaggaggctgagaagcctttacaggtggccgctgtagacagcagtgtcccacggacagcagagctggcgggcatcaccacacttgatgaccccctggggcatatgcctgagcgtttcgatgccttcatctgctattgccccagcgacatccagtttgtgcaggagatgatccggcaactggaacagacaaactatcgactgaagttgtgtgtgtctgaccgcgatgtcctgcctggcacctgtgtctggtctattgctagtgagctcatcgaaaagaggtgccgccggatggtggtggttgtctctgatgattacctgcagagcaaggaatgtgacttccagaccaaatttgcactcagcctctctccaggtgcccatcagaagcgactgatccccatcaagtacaaggcaatgaagaaagagttccccagcatcctgaggttcatcactgtctgcgactacaccaacccctgcaccaaatcttggttctggactcgccttgccaaggccttgtccctgccctgaagactgttctgaggccctgggtgtgtgtgtatctgtctgcctgtccatgtacttctgccctgcctcctcctttcgttgtaggaggaatctgtgctctacttacctctcaattcctggagatgccaacttcacagacacgtctgcagcagctggacatcacatttcatgtcctgcatggaaccagtggctgtgagtggcatgtccacttgctggattatcagccaggacactatagaacaggaccagctgagactaagaaggaccagcagagccagctcagctctgagccattcacacatcttcaccctcagtttcctcacttgaggagtgggatggggagaacagagagtagctgtgtttgaatccctgtaggaaatggtgaagcatagctctgggtctcctgggggagaccaggcttggctgcgggagagctggctgttgctggactacatgctggccactgctgtgaccacgacactgctggggcagcttcttccacagtgatgcctactgatgcttcagtgcctctgcacaccgcccattccacttcctccttccccacagggcaggtggggaagcagtttggcccagcccaaggagaccccaccttgagccttatttcctaatgggtccacctctcatctgcatctttcacacctcccagcttctgcccaaccttcagcagtgacaagtccccaagagactcgcctgagcagcttgggctgcttttcatttccacctgtcaggatgcctgtggtcatgctctcagctccacctggcatgagaagggatcctggcctctggcatattcatcaagtatgagttctggggatgagtcactgtaatgatgtgagcagggagccttcctccctgggccacctgcagagagctttcccaccaactttgtaccttgattgccttacaaagttatttgtttacaaacagcgaccatataaaagcctcctgccccaaagcttgtgggcacatgggcacatacagactcacatacagacacacacatatatgtacagacatgtactctcacacacacaggcaccagcatacacacgtttttctaggtacagctcccaggaacagctaggtgggaaagtcccatcactgagggagcctaaccatgtccctgaacaaaaattgggcactcatctattccttttctcttgtgtccctactcattgaaaccaaactctggaaaggacccaatgtaccagtatttatacctctaatgaagcacagagagaggaagagagctgcttaaactcacacaacaatgaactgcagacacagctgttctctccctctctccttcccagagcaatttatactttaccctcaggctgtcctctggggagaaggtgccatggtcttaggtgtctgtgccccaggacagaccctaggaccctaaatccaatagaaaatgcatatctttgctccactttcagccaggctggagcaaggtaccttttcttaggatcttgggagggaatggatgcccctctctgcatgatcttgttgaggcatttagctgccatgcacctgtccccctttaatactgggcattttaaagccatctcaagaggcatcttctacatgttttgtacgcattaaaataatttcaaagatatctgagaaaagccgatatttgccattcttcctatatcctggaatatatcttgcatcctgagtttataataataaataatattctaccttggaaaaaaaaaaaaaaa

SEQ ID NO: 76 - protein, 304 aa, Homo sapiens
MAAGGPGAGSAAPVSSTSSLPLAALNMRVRRRLSLFLNVRTQVAADWTALAEEMDFEYLEIRQLETQADPTGRLLDAWQGRPGASVGRLLELLTKLGRDDVLLELGPSIEEDCQKYILKQQQEEAEKPLQVAAVDSSVPRTAELAGITTLDDPLGHMPERFDAFICYCPSDIQFVQEMIRQLEQTNYRLKLCVSDRDVLPGTCVWSIASELIEKRLARRPRGGCRRMVVVVSDDYLQSKECDFQTKFALSLSPGAHQKRLIPIKYKAMKKEFPSILRFITVCDYTNPCTKSWFWTRLAKALSLP

SEQ ID NO: 77 - protein, 251 aa, Homo sapiens
MAAGGPGAGSAAPVSSTSSLPLAALNMRVRRRLSLFLNVRTQVAADWTALAEEMDFEYLEIRQLETQADPTGRLLDAWQGRPGASVGRLLELLTKLGRDDVLLELGPSIGHMPERFDAFICYCPSDIQFVQEMIRQLEQTNYRLKLCVSDRDVLPGTCVWSIASELIEKRCRRMVVVVSDDYLQSKECDFQTKFALSLSPGAHQKRLIPIKYKAMKKEFPSILRFITVCDYTNPCTKSWFWTRLAKALSLP

SEQ ID NO: 78 - protein, 191 aa, Homo sapiens
MAAGGPGAGSAAPVSSTSSLPLAALNMRVRRRLSLFLNVRTQVAADWTALAEEMDFEYLEIRQLETQADPTGRLLDAWQGRPGASVGRLLELLTKLGRDDVLLELGPSIEEDCQKYILKQQQEEAEKPLQVAAVDSSVPRTAELAGITTLDDPLGAAGWWWLSLMITCRARNVTSRPNLHSASLQVPIRSD

SEQ ID NO: 79 - protein, 146 aa, Homo sapiens
MAAGGPGAGSAAPVSSTSSLPLAALNMRVRRRLSLFLNVRTQVAADWTALAEEMDFEYLEIRQLETQADPTGRLLDAWQGRPGASVGRLLELLTKLGRDDVLLELGPSIGAAGWWWLSLMITCRARNVTSRPNLHSASLQVPIRSD

SEQ ID NO: 80 - protein, 296 aa, Homo sapiens
MAAGGPGAGSAAPVSSTSSLPLAALNMRVRRRLSLFLNVRTQVAADWTALAEEMDFEYLEIRQLETQADPTGRLLDAWQGRPGASVGRLLELLTKLGRDDVLLELGPSIEEDCQKYILKQQQEEAEKPLQVAAVDSSVPRTAELAGITTLDDPLGHMPERFDAFICYCPSDIQFVQEMIRQLEQTNYRLKLCVSDRDVLPGTCVWSIASELIEKRCRRMVVVVSDDYLQSKECDFQTKFALSLSPGAHQKRLIPIKYKAMKKEFPSILRFITVCDYTNPCTKSWFWTRLAKALSLP

SEQ ID NO: 81 - DNA, 1614 bp, Homo sapiens
gcatttccagagcagagttcagagaaaggctgggctgcttgttgctggctaaaggacaaagggtaagtttcaggaagcagaagagtgagcagatgaaattcagcactgggatcaggggagtgtctgatttgcaaaaggaaagtgcaaagacagctcctcccttctgaggaaacgaaaccaacagcagtccaagctcagtcagcagaagagataaaagcaaacaggtctgggaggcagttctgttgccactctctctcctgtcaatgatggatctcagaaataccccagccaaatctctggacaagttcattgaagactatctcttgccagacacgtgtttccgcatgcaaatcaaccatgccattgacatcatctgtgggttcctgaaggaaaggtgcttccgaggtagctcctaccctgtgtgtgtgtccaaggtggtaaagggtggctcctcaggcaagggcaccaccctcagaggccgatctgacgctgacctggttgtcttcctcagtcctctcaccacttttcaggatcagttaaatcgccggggagagttcatccaggaaattaggagacagctggaagcctgtcaaagagagagagcattttccgtgaagtttgaggtccaggctccacgctggggcaacccccgtgcgctcagcttcgtactgagttcgctccagctcggggagggggtggagttcgatgtgctgcctgcctttgatgccctgggtcagttgactggcggctataaacctaacccccaaatctatgtcaagctcatcgaggagtgcaccgacctgcagaaagagggcgagttctccacctgcttcacagaactacagagagacttcctgaagcagcgccccaccaagctcaagagcctcatccgcctagtcaagcactggtaccaaaattgtaagaagaagcttgggaagctgccacctcagtatgccctggagctcctgacggtctatgcttgggagcgagggagcatgaaaacacatttcaacacagcccagggatttcggacggtcttggaattagtcataaactaccagcaactctgcatctactggacaaagtattatgactttaaaaaccccattattgaaaagtacctgagaaggcagctcacgaaacccaggcctgtgatcctggacccggcggaccctacaggaaacttgggtggtggagacccaaagggttggaggcagctggcacaagaggctgaggcctggctgaattacccatgctttaagaattgggatgggtccccagtgagctcctggattctgctggtaaacctcacactggttggcagaaggaactataccaataattagtgaacatgcggtgaatttgcaacagacaagaggagcctcattatcctatagtttccaggttgcttagggaggcagaaatcacagcaaggaaaaccttcaataataaacagacgtctcataaaattaattgcaacccaacctctctctctacttaaaattagcatctatttccagctctgctttcaatgccccatatgaatacatgtgaactccctccctctcttcctccctgtctccttctctctctctctgtccctcattaaaaaat

SEQ ID NO: 82 - DNA, 1627 bp, Homo sapiens
gcatttccagagcagagttcagagaaaggctgggctgcttgttgctggctaaaggacaaagggtaagtttcaggaagcagaagagtgagcagatgaaattcagcactgggatcaggggagtgtctgatttgcaaaaggaaagtgcaaagacagctcctcccttctgaggaaacgaaaccaacagcagtccaagctcagtcagcagaagagataaaagcaaacaggtctgggaggcagttctgttgccactctctctcctgtcaatgatggatctcagaaataccccagccaaatctctggacaagttcattgaagactatctcttgccagacacgtgtttccgcatgcaaatcaaccatgccattgacatcatctgtgggttcctgaaggaaaggtgcttccgaggtagctcctaccctgtgtgtgtgtccaaggtggtaaagggtggctcctcaggcaagggcaccaccctcagaggccgatctgacgctgacctggttgtcttcctcagtcctctcaccacttttcaggatcagttaaatcgccggggagagttcatccaggaaattaggagacagctggaagcctgtcaaagagagagagcattttccgtgaagtttgaggtccaggctccacgctggggcaacccccgtgcgctcagcttcgtactgagttcgctccagctcggggagggggtggagttcgatgtgctgcctgcctttgatgccctgggtcagttgactggcggctataaacctaacccccaaatctatgtcaagctcatcgaggagtgcaccgacctgcagaaagagggcgagttctccacctgcttcacagaactacagagagacttcctgaagcagcgccccaccaagctcaagagcctcatccgcctagtcaagcactggtaccaaaattgtaagaagaagcttgggaagctgccacctcagtatgccctggagctcctgacggtctatgcttgggagcgagggagcatgaaaacacatttcaacacagcccagggatttcggacggtcttggaattagtcataaactaccagcaactctgcatctactggacaaagtattatgactttaaaaaccccattattgaaaagtacctgagaaggcagctcacgaaacccaggcctgtgatcctggacccggcggaccctacaggaaacttgggtggtggagacccaaagggttggaggcagctggcacaagaggctgaggcctggctgaattacccatgctttaagaattgggatgggtccccagtgagctcctggattctgctggtgagacctcctgcttcctccctgccattcatccctgcccctctccatgaagcttgagacatatagctggagaccattctttccaaagaacttacctcttgccaaaggccatttatattcatatagtgacaggctgtgctccatattttacagtcattttggtcacaatcgagggtttctggaattttcacatcccttgtccagaattcattcccctaagagtaataataaataatctctaacaccatttattgactgtctgcttcgggctcaggttctgtcctaagccctttaatatgcactctctcattaaatagtcacaacaa

SEQ ID NO: 83 - DNA, 1533 bp, Homo sapiens
agtccaagctcagtcagcagaagagataaaagcaaacaggtctgggaggcagttctgttgccactctctctcctgtcaatgatggatctcagaaataccccagccaaatctctggacaagttcattgaagactatctcttgccagacacgtgtttccgcatgcaaatcaaccatgccattgacatcatctgtgggttcctgaaggaaaggtgcttccgaggtagctcctaccctgtgtgtgtgtccaaggtggtaaagggtggctcctcaggcaagggcaccaccctcagaggccgatctgacgctgacctggttgtcttcctcagtcctctcaccacttttcaggatcagttaaatcgccggggagagttcatccaggaaattaggagacagctggaagcctgtcaaagagagagagcattttccgtgaagtttgaggtccaggctccacgctggggcaacccccgtgcgctcagcttcgtactgagttcgctccagctcggggagggggtggagttcgatgtgctgcctgcctttgatgccctgggtcagttgactggcggctataaacctaacccccaaatctatgtcaagctcatcgaggagtgcaccgacctgcagaaagagggcgagttctccacctgcttcacagaactacagagagacttcctgaagcagcgccccaccaagctcaagagcctcatccgcctagtcaagcactggtaccaaaattgtaagaagaagcttgggaagctgccacctcagtatgccctggagctcctgacggtctatgcttgggagcgagggagcatgaaaacacatttcaacacagcccagggatttcggacggtcttggaattagtcataaactaccagcaactctgcatctactggacaaagtattatgactttaaaaaccccattattgaaaagtacctgagaaggcagctcacgaaacccaggcctgtgatcctggacccggcggaccctacaggaaacttgggtggtggagacccaaagggttggaggcagctggcacaagaggctgaggcctggctgaattacccatgctttaagaattgggatgggtccccagtgagctcctggattctgctgacccagcacactccaggcagcatccaccccacaggcagaagaggactggacctgcaccatcctctgaatgccagtgcatcttgggggaaagggctccagtgttatctggaccagttccttcattttcaggtgggactcttgatccagagaggacaaagctcctcagtgagctggtgtataatccaggacagaacccaggtctcctgactcctggccttctatgccctctatcctatcatagataacattctccacagcctcacttcattccacctattctctgaaaatattccctgagagagaacagagagatttagataagagaatgaaattccagccttgactttcttctgtgcacctgatgggagggtaatgtctaatgtattatcaataacaataaaaataaagcaaatacca

SEQ ID NO: 84 - DNA, 1631 bp, Homo sapiens
agtccaagctcagtcagcagaagagataaaagcaaacaggtctgggaggcagttctgttgccactctctctcctgtcaatgatggatctcagaaataccccagccaaatctctggacaagttcattgaagactatctcttgccagacacgtgtttccgcatgcaaatcaaccatgccattgacatcatctgtgggttcctgaaggaaaggtgcttccgaggtagctcctaccctgtgtgtgtgtccaaggtggtaaagggtggctcctcaggcaagggcaccaccctcagaggccgatctgacgctgacctggttgtcttcctcagtcctctcaccacttttcaggatcagttaaatcgccggggagagttcatccaggaaattaggagacagctggaagcctgtcaaagagagagagcattttccgtgaagtttgaggtccaggctccacgctggggcaacccccgtgcgctcagcttcgtactgagttcgctccagctcggggagggggtggagttcgatgtgctgcctgcctttgatgccctgggtcagttgactggcggctataaacctaacccccaaatctatgtcaagctcatcgaggagtgcaccgacctgcagaaagagggcgagttctccacctgcttcacagaactacagagagacttcctgaagcagcgccccaccaagctcaagagcctcatccgcctagtcaagcactggtaccaaaattgtaagaagaagcttgggaagctgccacctcagtatgccctggagctcctgacggtctatgcttgggagcgagggagcatgaaaacacatttcaacacagcccagggatttcggacggtcttggaattagtcataaactaccagcaactctgcatctactggacaaagtattatgactttaaaaaccccattattgaaaagtacctgagaaggcagctcacgaaacccaggcctgtgatcctggacccggcggaccctacaggaaacttgggtggtggagacccaaagggttggaggcagctggcacaagaggctgaggcctggctgaattacccatgctttaagaattgggatgggtccccagtgagctcctggattctgctggctgaaagcaacagtgcagacgatgagaccgacgatcccaggaggtatcagaaatatggttacattggaacacatgagtaccctcatttctctcatagacccagcacactccaggcagcatccaccccacaggcagaagaggactggacctgcaccatcctctgaatgccagtgcatcttgggggaaagggctccagtgttatctggaccagttccttcattttcaggtgggactcttgatccagagaggacaaagctcctcagtgagctggtgtataatccaggacagaacccaggtctcctgactcctggccttctatgccctctatcctatcatagataacattctccacagcctcacttcattccacctattctctgaaaatattccctgagagagaacagagagatttagataagagaatgaaattccagccttgactttcttctgtgcacctgatgggagggtaatgtctaatgtattatcaataacaataaaaataaagcaaatacca

SEQ ID NO: 85 - protein, 360 aa, Homo sapiens
MMDLRNTPAKSLDKFIEDYLLPDTCFRMQINHAIDIICGFLKERCFRGSSYPVCVSKVVKGGSSGKGTTLRGRSDADLVVFLSPLTTFQDQLNRRGEFIQEIRRQLEACQRERAFSVKFEVQAPRWGNPRALSFVLSSLQLGEGVEFDVLPAFDALGQLTGGYKPNPQIYVKLIEECTDLQKEGEFSTCFTELQRDFLKQRPTKLKSLIRLVKHWYQNCKKKLGKLPPQYALELLTVYAWERGSMKTHFNTAQGFRTVLELVINYQQLCIYWTKYYDFKNPIIEKYLRRQLTKPRPVILDPADPTGNLGGGDPKGWRQLAQEAEAWLNYPCFKNWDGSPVSSWILLVNLTLVGRRNYTNN

SEQ ID NO: 86 - protein, 364 aa, Homo sapiens
MMDLRNTPAKSLDKFIEDYLLPDTCFRMQINHAIDIICGFLKERCFRGSSYPVCVSKVVKGGSSGKGTTLRGRSDADLVVFLSPLTTFQDQLNRRGEFIQEIRRQLEACQRERAFSVKFEVQAPRWGNPRALSFVLSSLQLGEGVEFDVLPAFDALGQLTGGYKPNPQIYVKLIEECTDLQKEGEFSTCFTELQRDFLKQRPTKLKSLIRLVKHWYQNCKKKLGKLPPQYALELLTVYAWERGSMKTHFNTAQGFRTVLELVINYQQLCIYWTKYYDFKNPIIEKYLRRQLTKPRPVILDPADPTGNLGGGDPKGWRQLAQEAEAWLNYPCFKNWDGSPVSSWILLVRPPASSLPFIPAPLHEA

SEQ ID NO: 87 - protein, 414 aa, Homo sapiens
MMDLRNTPAKSLDKFIEDYLLPDTCFRMQINHAIDIICGFLKERCFRGSSYPVCVSKVVKGGSSGKGTTLRGRSDADLVVFLSPLTTFQDQLNRRGEFIQEIRRQLEACQRERAFSVKFEVQAPRWGNPRALSFVLSSLQLGEGVEFDVLPAFDALGQLTGGYKPNPQIYVKLIEECTDLQKEGEFSTCFTELQRDFLKQRPTKLKSLIRLVKHWYQNCKKKLGKLPPQYALELLTVYAWERGSMKTHFNTAQGFRTVLELVINYQQLCIYWTKYYDFKNPIIEKYLRRQLTKPRPVILDPADPTGNLGGGDPKGWRQLAQEAEAWLNYPCFKNWDGSPVSSWILLTQHTPGSIHPTGRRGLDLHHPLNASASWGKGLQCYLDQFLHFQVGLLIQRGQSSSVSWCIIQDRTQVS

SEQ ID NO: 88 - protein, 400 aa, Homo sapiens
MMDLRNTPAKSLDKFIEDYLLPDTCFRMQINHAIDIICGFLKERCFRGSSYPVCVSKVVKGGSSGKGTTLRGRSDADLVVFLSPLTTFQDQLNRRGEFIQEIRRQLEACQRERAFSVKFEVQAPRWGNPRALSFVLSSLQLGEGVEFDVLPAFDALGQLTGGYKPNPQIYVKLIEECTDLQKEGEFSTCFTELQRDFLKQRPTKLKSLIRLVKHWYQNCKKKLGKLPPQYALELLTVYAWERGSMKTHFNTAQGFRTVLELVINYQQLCIYWTKYYDFKNPIIEKYLRRQLTKPRPVILDPADPTGNLGGGDPKGWRQLAQEAEAWLNYPCFKNWDGSPVSSWILLAESNSADDETDDPRRYQKYGYIGTHEYPHFSHRPSTLQAASTPQAEEDWTCTIL

SEQ ID NO: 89 - DNA, 10744 bp, Homo sapiens
attctccgcggcgcggcggcgagtgctggctgcggtaccctcccgctcgcttgtccgtctgcgcgcccgcgatgtgaccagccgactgggggcgggctggcggctctgcctgcggcagcgcatcggtttttctcctggcaggtccctaattgagccgtgattcccttggagccagagacacccaccaggggctcggagcgccgcgctccggggctggaggcagctgcagcgctcgggtccgcgcggccgggtgcagtagcctcagtcccagccgccgcctcgctgagtcgtgtgccctggcgaatgcccggcgcccggcacagctgagccaaggcgactggtgcagagcggcggcgcctggtcctgcacttgccgctgctgccgggctgtgccggggcggcggcgctgcgcgccggagtttgcagaggctgcctccgagcgccgtccgccaggaagactccctgcctcctgagtcccaaaaacacgagatttttctcctatttcagcagttggccacaacttcattgctgggaaaaggccaagaaagaagagagaactctcaccacaacatttcaaagggaatacattgccagaacttggaatactctactggacaaacatttcctccaaggacacagctctctgcctccatgtcaccacctttgaaggactgactgattccctcggctggtgccagtgcctgctcctgccatggggcccgcggggagcctgctgggcagcggacagatgcagatcaccctgtggggaagtctggctgctgtcgccattttcttcgtcatcaccttcctcatcttcctgtgctctagttgtgacagggaaaagaagccgcgacagcatagtggggaccatgagaacctgatgaacgtgccttcagacaaggagatgttcagccgttcagttactagcctggcaacagatgctcctgccagcagtgagcagaatggggcactcaccaatggggacattctttcagaggacagtactctgacctgcatgcagcattacgaggaagtccagacatcggcctcggatctgctggattcccaggacagcacagggaaaccaaaatgtcatcagagtcgggagctgcccagaatccctcccgagagcgcagtggataccatgctcacggcgagaagtgtggacggggaccaggggctggggatggaagggccctatgaagtgctcaaggacagctcctcccaagaaaacatggtggaggactgcttgtatgaaactgtgaaagagatcaaggaggtggctgcagctgcacacctggagaaaggccacagtggcaaggcaaaatctacttctgcctcgaaagagctcccagggccccagactgaaggcaaagctgagtttgctgaatatgcctcggtggacagaaacaaaaaatgtcgtcaaagtgttaatgtagagagtatccttggaaattcatgtgatccagaagaggaggccccaccacctgtccctgttaagcttctggacgagaatgaaaaccttcaggagaaggaagggggagaggcggaagagagtgccacagacacgaccagtgaaactaacaagagatttagctcattgtcatacaagtctcgggaagaagaccccactctcacagaagaagagatctcagctatgtactcatcagtaaataaacctggacagttagtgaataaatcggggcagtcgcttacagttccggagtccacctacacctccattcaaggggacccacagaggtcaccctcctcctgtaatgatctctatgctactgttaaagacttcgaaaaaactccaaacagcacacttccaccagcagggaggcccagcgaggagccagagcctgattatgaagcgatacagactctcaacagagaggaagaaaaggccaccctggggaccaatggccaccacggtctcgtcccaaaggagaacgactacgagagcataagtgacttgcagcaaggcagagatattaccaggctctagcaacccagaagacaaccctgggtagcctgtgatcagtgtctggagacgtttcttctgtggaagagaagaagtgacacaaacctatacttcatatgctgctttagtcacctgaagatggttggagaggccctgtcgactgttctcccagttgttcagtttctgagacagagaggtacggactaggctgcacctgagtgtgcccctgcctgccagatggacaggtacacccaagcacatctccctgctgcaccctcaccacccacaaaagatcccagctgtcagtggtctcatctcattagtgaggaaagccaagctgtatggaaaagctgcactcaccaaggaccacaatgcccccggcctaaagtactgccattcagaaaagcaggtttttcttcctctctttccttttctctgtctgctactgactttaaggctttttcccccttgaaatgtccagattcctgtggttcatcccaaggaaattttcacacaaagcttggcctttgccctcaatataggtgttttaggatggtgacaaaccatggctgctgctttctgcccagctcgccagtcctccccaaagagttgcgcatcagcacctggggatctggaccctgcgggtgaagggatggggagggacgtccctggagtctcttctgtctttgttccttcttattttggcattcgatatcagcagcctctccccaaagtacttgaagtcagttttagatgctttattttatttttctagtcaaaaacgtgtttcccccagtgtttgaaaactcgtccgaatcttttcagtattttccatgagtattgtggtacttctagacttgtttaagcccagaactcattccttcaaaacagagagccttaatctttatgttgggacacagaccacatatttggacggcagccatgcatccatcgctgaagggctgtggacatgaatgtgtatttcccatggtctccgctgcccacaccaacagtgtggcatctcataagttaactgctaccctaaggtaatctaagattaaaatgtaaacatttatttttgttatgtaagtttataagatgttttatgttcaatgcctaatttctcaaaagtgccagaaaaaaatgtatattagctattttgattttatgtacaatgatttatactctccttttgaaaagataccataaagcacataagctagatcactacaaggagctgttatcttttttctaatcaagtgtttaaaacactgatggtttttaaagactcacctttttaaatggtacttggagctcctgattcaaattacctagaccccctagagaaataaatggaatatacataaataatcattttcagtggtttatggtgggcaatattgcaatatttgaaatggtaaaaatggaaagaagaacaaaatatgatgagaggtggctgtgaattataaacctcataaaagtgtcataattccattaaggtttaattatattttttcagaaaacagtgatgaattctgtagtccagtgcttgccaatgcaaattgcctattggaatcttcttcctatattttacaaacatcagtggctgaaatagctcagagtaagagctcagcctggtttgaatttaatcatctctttagatcttataaggccagcattaggaaacttgttcacttttcattttcaaaggagcctagttgaagtgctattatgagtgtgggctatggaaagacagcttttcctacactgataaagaaaaaaaatgaggaaattatttcatccccttgtgacatctgtgactttttggatttaataatcttgctgtttttcctctttatgacaaagaatataattgggaggatgaagtgtcttaaaaattgtagagaccagctcactggaatgtttttccatccctgtattcatggcttgactttgtgactgctctacactgcatgtctgacattgcagagtgagctatgttgaggtaaactggttggttgtcattattttgcaatcagcctggtctctcccatgaagatgtcgtgtgcataagcacaatcatcactgattagaagatcacagcagaatacccttggattagagagaagttcgtaccttgcatttctctgaattctagtctctcataagcactgctttgctggatgattttcactgctttgtgttaatgactttgagcgatctctcacatgatggggttctttagtacatggtaacagccatgtcatcttacacacctagcattgtgaatgctgtagtgacatcctttataggcaccttacagctcaaaacttttgtttcatttcatgccttacttatcaaaaaggcaggaaagtaggtatgatctctaaagtaaaaaaaaaaaaaaaaaaaaaactttttatagaaagctcataaataatcatgtcattttgcaattttgttaccaaaatttcccccaagagttttcaaatattagttctgcaatgtggctatgaaatatgcactgaaatataccttttaatttgagaaccagtggttagaataagctgtgatataaagtattttcagtgtacttttaaaggaactataaggccctccagcataaacgctaaaagaatagatggtagcacaggccatgagggctgggggagagaagcagagtgaaccttagaaagatggctcagctatttggagcactggatattttactgaagttatttactgaggcaccatcactgttttgactgtacagtatagtttttcataaatttcatcacatttactttgttcagaatctgggcttgaatctttgagttggacaaaagcctatggtttcttttaaaaagtttcatcttgagctaatgctacagtttaaataaaatgtatgaaaggtagttatcaaaaacaatttgtatatttaaaattctattttgacatccattttttacagcgaattatagcaggttatgtgaaatttaaaaataaattttaggaaatttttttatcttgtaagtaagaattataaatctatctcagttaaaagtaggatctttgtttttattcagatattttgaaagtttagaagcattttgtatgctactttggtatttcttaagtatagtcagcaggaaagggtaacctgttttatgcaaaatttttttaatttgtcaaatgtttttagtgtgtctactttctgaaatagtctcaatatcctgtctgtatcctaggcagataactacacaagaacaaaacgctatatagaaaagaaaatatttgaggaaatcttaaattccataagaaagtaattcttgcaagaatgttggctacatatttttttttctgtcctgaataaattacatcattaggtctgttgaagcttttgaagctaccactattctttctgggataaaggctaattactgatttatctgccctcaaaatcccagagttaattctaattgagtactaaattaacagtaagtagttaacacagagaactaaaatttaaccgcattatatcactgtatatatttctcatgatttttgctaattagagcatttacttaaccagtaataaactacacacacacacacacacacacacacgtatacgtgtgtgtgtgtatatacttggctctgacacaactctggtgcttaattaggatatgttctattatgtattttgaatgtttatcctgctagtgtgatgaacttttgttggaaaagcagaattagaaggaacagtttttcaatcagtttcatttggtaattacaggaaaaccttgagttgctctaatttaatttttccaattaatacatttagactttaaattgcatccgtaattctcttggctgaaaaacagtggtattttaagacagttttgttatacatgtgacttacttttgactcagcctgagaggaggaaatgtaaagagataagagatttggcccaaagcagcaagagactagtaaccttgagccaggacgaagccaagacaacgtgactcccaagtagcaggagcagaggtcggtcacctgtggcattctgtttcattcccttttaaaattatgagactttataggcagtgtaaaacatcagcaggcagcgatgtgataggatgtgcgaaaaagctggtctgataccatggctataattacagagctttagttcaattaggattttgtaaatgagcaaatgacctttttttccagtgccccttgtaatagttaatatgagtccatgcaatcttgtgatgccattctcctgaaggtgttgatttctggtacccagccagcttagctttggctgctggaagcacagtaggtactgatgattacttcctggaaatcttgacaggcttattgtactgtgtaatggggaaaagttaaagtataatgtttggtgttaataaatgactgatgtgaaaataggaacatgtgtctttaatatcaaatatggctttatttgcagtgaaatctaaattccttattctacagtagtattttcttgccctgtgttgtatattttcctaaatacatttttcctgacagtggctttaggccagttgaacacacttagactgaaagtgtttaacttaaagagatcagtccagaaaccatgataaattagaatctttatctggaattaccaaattaaaatttaaaatcatggtccagaagagaacaaacattcatggttttttttatcctactgctcatttttaggtctgtgtttacatctagtctctactatttgtgaagtatgtcattatttttttcaagttcttctttgacttaactgaaaaataatattccaaattcttaatgtaacatgaaaagagaaatacaatttttgcttaaaagacattttttaaaaagcgttcaattcagtaatcatttctgttaatacaggaagtttttttggcttgccagttatatactgtgggtattttttaaaatgtgctacccttgggttgtctcatatcaccttgcgtaatcatgtattacaaaggttgataattgtcatttctcagatgtctgtatgttacattggcagcagtaaaatgttttaatgttgttaccttttaaataattgtgttgtattaacatgcctcatattttctggggaaacttgaaatatatctaaacaaaaaaggtctgttataaataggaattggcatttcattgttaatgttttttcctcataaaaatagttacaccaaaagtgacatattgtctattacatgggcccaatcagtattaaagtactccccttactcaaaaatattaaaaaataattcatgacacttagtagcattttcattgattgtttcaaaagatcttcataatggtcaaattgtccaattcacaaaagagtgagaaagttgttttcagtactgggaatttttaaaccttagttttaagaccaaaaatatctcttattagcttgaacattttgtgattacttttccctccccggatctagtccttttaaggagtaagtctaaagaatgaggccatgaagtcactatttcctcccacctcagtttgtctcctggtacttagctggcctatcgctttgtgtggcaatacccctgggtcgcttccccactcagccttctgtatctgctgttcacaggacatgccattatgtctttccagtacggatcacagtgctgccatatcacagaccctgccagccggcacagaaccatgcctcgtcacagctctgcccaactcacaggctgccaagatgaggccacaggtccacctagggcggcagatgctggtgctatttgtcacgacttttgccaaaacatgtacactgttgctcacatctttcgtaagaatggttgacactaaggggccatggaaaagcacttttaaaaaattatgtggtggaatcaaactcacagaggcagaaatgttagtgccgtgctctaaccaagtaagcttagtgttccccacagtgatctgtatctggcctgagtctcctcaagcagcaacccccactgtccagcatgtggaaggtagatccttatgacaacaccagacccatagttaccaggaaagaaaaaggaagctgagtgttgtgaaggggaagaaatcctttttataagaagtaatcatttttaggccgggtgcagtggctcatgcctgtaatcccagcactttgggaggctgagacaggtggatcacttgaggtcaggagtttgagacctgcctggccaacatgatgaaaccctgtctctactaaaaatgcaaaaaaaattagccaggcatggtggcatgtgcctgtagtcccaactactcaggaggctgaggcaggagaatcacttgaacctgggaggcagaggttgcaatgagctgagatcgcaacactgcactccagcctgggcgacagagcaagactccatctcaaaaacaaaaacaaaaaaaaaacctttttaaagtaaattgagtgtaaaatgttttcaccatgaagccattgcaccctctcccccaggaaacagtgcctaaggatgatgtcaagttacagccagtttgctctgatcccccaggacctaagaaaactgtgagtgcttcagcatgcaaaggtagagctaccagataaggagaataacttggccatttatagcaaactgcctgactttggagtgagaaaccaagcaccttctaggtcctaggataggtgaattggaggtgcagctgctgaagttcccattttctacatacttcaggagccagggtgtttcatttggttttgtaaaactttgctgtaagtcatcacagttaattctttgaatggacattttagagtgtaactttttttcaaaattagcagaacagatatctctgctcattctctttatacatttagttttttaaagttcccctagtatacctgttaggcactctaaataggacacagttaaagctaaaagaaggaccagttgctccctagagcctacagttcagaactatcttgttgtcatgtcctggtttggtttggtttgtttttaactcaacaagttggaaaccatgagtttaaagcaaactatttccttttcttaagcttaaagagaattttttttttaatctttagctcctcatttaggtagtgaaggcttccctgaaagacagcagtgcccttctctggaagaagaggctgggaccaaaagcctgagtctatgggttgaggattttgagcattcctttgacaagcttctatgtatttttaatataagactcataaatgaacctgatgtggtgttcatgacccatcccttaagcatgcttgctttttttaactttactttttgagtatagtacttgtcttgtttttcctggagccatgctaggatttaattcctatgtgccactacccgcccatgtcctggaagatggccatgcctgcagcaatgctcatgtcttgaggagaagcaatgtgaaaagcatcaggaaagctgaaccttacgttcaagtcagcaaacatttgtgagcattctagtatgcttgcgaccttgacactttttaaaaattatctttttatttgcttcgagtatcaaccgtatagttgactctagtggggcgaagggagcagagatgagagcaaaattcagacttgctgcccctgtgtgtctcagttctcatgtctctctgagaaatgtgttggcccaattccctatctgccactctgagtctcttgagtaaatgtgtgtaaatgagaaaaattatctcaaagatttaacttattatttagatattttcttctttttaaactcaggaataaacctggtttgtagataatataatatggctactagagctataattgagtaggtgactagaagcattttttcaaatatatttcttgtaaagacatctactttgttttaactaggaaaagaaactcctcatattaaaataaacatttccataagcactttctagaagagtgtagcatccatctaccatccatcccagaatgtttgtatcttgctcatagtatttcaaaaatttttatgggtgaaaaaaatgcacttttttatttattggaaaagtgtagagttattgaattaaattctcaagtgggacaatttagtgtaaagggaaacatgggttttggagacaagagcacagggctgtggtccctgttccagcattgactttactatgtgacctcgagcaaatgatttaacttctctgtgcctcagtttctccatatacaaaatggggataatgatactaaccattgcctacctcatagagatgttatggggacaaacgaaataatagagataagcacgaatgctttcaactcttcggaagaaaggtgctatataaattgaagttgtgtttttaatgatccaattattaattatgtttagggtttaaataacaatactgttagtcatgttaagaataagttttgttttgatgcatatttccacttctcttctgtggccagatcttgatcattcaaccagtaatggtacctgaggaactgaaatgggtatttgttttcgtatgtttctgccagtagtatttcaattgaatatccagaaaagactggagtttaacttgtaatatcttatagtttacatgtaataaaacttattcaagctatatataaaagtatgattacatgtaaatagcaggtatgttgtaattaaaggcacttatcaaattgtctttgttcttttttaattgtaataaaagtcagttttacataaa

SEQ ID NO: 90 - protein, 432 aa, Homo sapiens
MGPAGSLLGSGQMQITLWGSLAAVAIFFVITFLIFLCSSCDREKKPRQHSGDHENLMNVPSDKEMFSRSVTSLATDAPASSEQNGALTNGDILSEDSTLTCMQHYEEVQTSASDLLDSQDSTGKPKCHQSRELPRIPPESAVDTMLTARSVDGDQGLGMEGPYEVLKDSSSQENMVEDCLYETVKEIKEVAAAAHLEKGHSGKAKSTSASKELPGPQTEGKAEFAEYASVDRNKKCRQSVNVESILGNSCDPEEEAPPPVPVKLLDENENLQEKEGGEAEESATDTTSETNKRFSSLSYKSREEDPTLTEEEISAMYSSVNKPGQLVNKSGQSLTVPESTYTSIQGDPQRSPSSCNDLYATVKDFEKTPNSTLPPAGRPSEEPEPDYEAIQTLNREEEKATLGTNGHHGLVPKENDYESISDLQQGRDITRL

SEQ ID NO: 91 - DNA, 8240 bp, Homo sapiens
cccctctcggtagccctgaggctctggcgccttcaagtgagaagctaagcaccagcctctgctgggctgcagaagcggcggcggcggcagcagcagcagcagcatcaggaaggcgctcgggccagcgcggtgaacccgggctgggcagcaggtcgcggagccgcgagccaggatggaggcagagggcagcagcgcgccggcccgggcgggcagcggagagggcagcgacagcgccggcggggccacgctcaaagcccccaagcatctctggaggcacgagcagcaccaccagtacccgctccggcagccccagttccgcctcctgcatccccatcaccacctgcccccgccgccgccaccctcgccccagccccagccccagtgtccgctacagccgccgccgccgccccccctgccgccgcccccgccgccgcccggggctgcccgcggccgctacgcctcgagcggggccaccggccgcgtccggcatcgcggctactcggacaccgagcgctacctgtactgtcgcgccatggaccgcacctcctacgcggtggagaccggccaccggcccggcctgaagaaatccaggatgtcctggccctcctcgttccagggactcaggcgttttgatgtggacaatggcacatctgcgggacggagtcccttggatcccatgaccagcccaggatccgggctaattctccaagcaaattttgtccacagtcaacgacgggagtccttcctgtatcgatccgacagcgattatgacctctctccaaagtctatgtcccggaactcctccattgccagtgatatacacggagatgacttgattgtgactccatttgctcaggtcttggccagtctgcgaactgtacgaaacaactttgctgcattaactaatttgcaagatcgagcacctagcaaaagatcacccatgtgcaaccaaccatccatcaacaaagccaccataacagaggaggcctaccagaaactggccagcgagaccctggaggagctggactggtgtctggaccagctagagaccctacagaccaggcactccgtcagtgagatggcctccaacaagtttaaaaggatgcttaatcgggagctcacccatctctctgaaatgagtcggtctggaaatcaagtgtcagagtttatatcaaacacattcttagataagcaacatgaagtggaaattccttctccaactcagaaggaaaaggagaaaaagaaaagaccaatgtctcagatcagtggagtcaagaaattgatgcacagctctagtctgactaattcaagtatcccaaggtttggagttaaaactgaacaagaagatgtccttgccaaggaactagaagatgtgaacaaatggggtcttcatgttttcagaatagcagagttgtctggtaaccggcccttgactgttatcatgcacaccatttttcaggaacgggatttattaaaaacatttaaaattccagtagatactttaattacatatcttatgactctcgaagaccattaccatgctgatgtggcctatcacaacaatatccatgctgcagatgttgtccagtctactcatgtgctattatctacacctgctttggaggctgtgtttacagatttggagattcttgcagcaatttttgccagtgcaatacatgatgtagatcatcctggtgtgtccaatcaatttctgatcaatacaaactctgaacttgccttgatgtacaatgattcctcagtcttagagaaccatcatttggctgtgggctttaaattgcttcaggaagaaaactgtgacattttccagaatttgaccaaaaaacaaagacaatctttaaggaaaatggtcattgacatcgtacttgcaacagatatgtcaaaacacatgaatctactggctgatttgaagactatggttgaaactaagaaagtgacaagctctggagttcttcttcttgataattattccgataggattcaggttcttcagaatatggtgcactgtgcagatctgagcaacccaacaaagcctctccagctgtaccgccagtggacggaccggataatggaggagttcttccgccaaggagaccgagagagggaacgtggcatggagataagccccatgtgtgacaagcacaatgcttccgtggaaaaatcacaggtgggcttcatagactatattgttcatcccctctgggagacatgggcagacctcgtccaccctgacgcccaggatattttggacactttggaggacaatcgtgaatggtaccagagcacaatccctcagagcccctctcctgcacctgatgacccagaggagggccggcagggtcaaactgagaaattccagtttgaactaactttagaggaagatggtgagtcagacacggaaaaggacagtggcagtcaagtggaagaagacactagctgcagtgactccaagactctttgtactcaagactcagagtctactgaaattccccttgatgaacaggttgaagaggaggcagtaggggaagaagaggaaagccagcctgaagcctgtgtcatagatgatcgttctcctgacacgtaacagtgcaaaaactttcatgccttttttttttttaagtagaaaaattgtttccaaagtgcatgtcacatgccacaaccacggtcacacctcactgtcatctgccaggacgtttgttgaacaaaactgaccttgactactcagtccagcgctcaggaatatcgtaaccagttttttcacctccatgtcatccgagcaaggtggacatcttcacgaacagcgtttttaacaagatttcagcttggtagagctgacaaagcagataaaatctactccaaattattttcaagagagtgtgactcatcaggcagcccaaaagtttattggacttggggtttctattcctttttatttgtttgcaatattttcagaagaaaggcattgcacagagtgaacttaatggacgaagcaacaaatatgtcaagaacaggacatagcacgaatctgttaccagtaggaggaggatgagccacagaaattgcataattttctaatttcaagtcttcctgatacatgactgaatagtgtggttcagtgagctgcactgacctctacattttgtatgatatgtaaaacagattttttgtagagcttacttttattattaaatgtattgaggtattatatttaaaaaaaactatgttcagaacttcatctgccactggttatttttttctaaggagtaacttgcaagttttcagtacaaatctgtgctacactggataaaaatctaatttatgaattttacttgcaccttatagttcatagcaattaactgatttgtagtgattcattgtttgttttatataccaatgacttccatattttaaaagagaaaaacaactttatgttgcaggaaaccctttttgtaagtctttattatttactttgcattttgtttcactctttccagataagcagagttgctcttcaccagtgtttttcttcatgtgcaaagtgactatttgttctataatacttttatgtgtgttatatcaaatgtgtcttaagcttcatgcaaactcagtcatcagttcgtgttgtctgaagcaagtgggagatatataaatacccagtagctaaaatggtcagtcttttttagatgttttcctacttagtatctcctaataacgttttgctgtgtcactagatgttcatttcacaagtgcatgtctttctaataatccacacatttcatgctctaataatccacacatttcatgctcatttttattgtttttacagccagttatagtaagaaaaaggtttttccccttgtgctgctttataatttagcgtgtgtctgaaccttatccatgtttgctagatgaggtcttgtcaaatatatcactaccattgtcaccggtgaaaagaaacaggtagttaagttagggttaacattcatttcaaccacgaggttgtatatcatgactagcttttactcttggtttacagagaaaagttaaacagccaactaggcagtttttaagaatattaacaatatattaacaaacaccaatacaactaatcctatttggttttaatgatttcaccatgggattaagaactatatcaggaacatccctgagaaacggttttaagtgtagcaactactcttccttaatggacagccacataacgtgtaggaagtcctttatcacttatcctcgatccataagcatatcttgcagaggggaactacttctttaaacacatggagggaaagaagatgatgccactggcaccagagggttagtactgtgatgcatcctaaaatatttattatattggtaaaaattctggttaaataaaaaattagagatcactcttggctgatttcagcaccaggaactgtattacagttttagagattaattcctagtgtttacctgattatagcagttggcatcatggggcatttaattctgactttatccccacgtcagccttaataaagtcttctttaccttctctatgaagactttaaagcccaaataatcatttttcacattgatattcaagaattgagatagatagaagccaaagtgggtatctgacaagtggaaaatcaaacgtttaagaagaattacaactctgaaaagcatttatatgtggaacttctcaaggagcctcctggggactggaaagtaagtcatcagccaggcaaatgactcatgctgaagagagtccccatttcagtcccctgagatctagctgatgcttagatcctttgaaataaaaattatgtctttataactctgatcttttacataaagcagaagaggaatcaactagttaattgcaaggtttctactctgtttcctctgtaaagatcagatggtaatctttcaaataagaaaaaaataaagacgtatgtttgaccaagtagtttcacaagaatatttgggaacttgtttcttttaattttatttgtccctgagtgaagtctagaaagaaaggtaaagagtctagagtttattcctctttccaaaacattctcattcctctcctccctacacttagtatttcccccacagagtgcctagaatcttaataatgaataaaataaaaagcagcaatatgtcattaacaaatccagacctgaaagggtaaagggtttataactgcactaataaagagaggctctttttttttcttccagtttgttggtttttaatggtaccgtgttgtaaagatacccactaatggacaatcaaattgcagaaaaggctcaatatccaagagacagggactaatgcactgtacaatctgcttatccttgcccttctctcttgccaaagtgtgcttcagaaatatatactgctttaaaaaagaataaaagaatatccttttacaagtggctttacatttcctaaaatgccataagaaaatgcaatatctgggtactgtatggggaaaaaaatgtccaagtttgtgtaaaaccagtgcatttcagcttgcaagttactgaacacaataatgctgttttaattttgttttatatcagttaaaattcacaataatgtagatagaacaaattacagacaaggaaagaaaaaacttgaatgaaatggattttacagaaagctttatgataatttttgaatgcattatttattttttgtgccatgcattttttttctcaccaaatgaccttacctgtaatacagtcttgtttgtctgtttacaaccatgtatttattgcaatgtacatactgtaatgttaattgtaaattatctgttcttattaaaacatcatcccatgatgggatggtgttgatatatttggaaactcttggtgagagaatgaatggtgtgtatacatactctgtacatttttcttttctcctgtaatatagtcttgtcaccttagagcttgtttatggaagattcaagaaaactataaaatacttaaagatatataaatttaaaaaaacatagctgcaggtctttggtcccagggctgtgccttaactttaaccaatattttcttctgttttgctgcatttgaaaggtaacagtggagctagggctgggcattttacatccaggcttttaattgattagaattctgccaataggtggattttacaaaaccacagacaacctctgaaagattctgagacccttttgagacagaagctcttaagtacttcttgccagggagcagcactgcatgtgtgatggttgtttgccatctgttgatcaggaactacttcagctacttgcatttgattatttcctttttttttttttttaactcggaaacacaactggggaaatatattctttcccagtgattataaacaatctttttcttttttttaagtccttttggcttctagagctcataggaaaatggacttgatttgaaattggagccagagtttactcgtgttggttatctattcatcagcttcctgacatgttaagagaatacattaaagagaaaatactgttttttaatcctaaaatttttcttccactaagataaaccaaatgtccttacatatatgtaaacccatctatttaaacgcaaaggtgggttgatgtcagtttacatagcagaaagcattcactatcctctaagatttgtttctgcaaaactttcattgctttagaattttaaaatttcaccttgtacaatggccagcccctaaagcaggaaacatttataatggattatatggaaacatcctcccagtacttgcccagcccttgaatcatgtggcttttcagtgaaaggaaagattctttttctaggaaaaatgagcctattttattttattttattttattttttgacacaaactgtagattttagcagccctggcccaaaggaatttgattacttttgttttaaacagtacaaaggggacactataattacaaaaacatccttaactgatttgagttgtttttatttctttggatatattttcagagtggtaaattgtgtgtgagaattacaaatgattattcttttagtggtttcttagcctctcttacagcccacggggatagtactgtacatcaataccttcatatgaaatttttatatgcaatgaaaataaaagcatgggttgattctgcctatttatgactcaatcttttacaaataaaagattattcattttaaattatagttcaatcagcatgtctcttaggatactgaacgtggttgaaatgaaaggatagtgacatcataagttagtactgatattcataaccaaataaagccaacttgagtaattttgctacattaaaaattaccaaaattacttagatggcctataagattaagcatggtgttttctaagcaagctttgaaaggggccttccatacttacttaattgaatattctgggatattgaaaattattcagatacttgacaattatttttggttacctactccgcaaactacaaagttttaaggactcaacaataagttaatgagacacagtgtttgctttcatggagcttacagtctggaggggacaaaggcttaaacaatactcatataattatatatgtgatcagtacaatgaaggagctcagtggggtaaataagcaggaacctgaacttgatctgttccggagggccacagaaggcttccttgaggccttgagaaagtgatttgcatctgagttctgaaggattgtaagaggtaactagggaaaaagttgacaggaagaggaaggggatccagacaagaaacatttgcaaagatcttgaggcataaatgagcttgagacatctggagaaactgaggaaaagtgagagagtaggcagggcctggagccgcagagccattgctaaccatcctgtgtgagatatcccccattctgtagctttattctcataaccctgctcaattttctttataacacttctcacagatttatatacgtgtttgtttttgttatctgtctctcccaccagaccacagctccatgagagcaaggtctttgcttaccaatatatcactagcacttaaaactatgcctggtacacagtaggttcttaatatgtgttgaatatagccatcaaattgatattggatataattcaatctgataagatattttgagatattaaagagtttttaacttgataccataaaaaaaaaaaaaaaaa

SEQ ID NO: 92 - DNA, 8153 bp, Homo sapiens
aatacttgttgcaataattgcccacgatagctgctcaaacaagagagttggaattcatctgtaaaaatcactacatgtaacgtaggagacaagaaaaatattaatgacagaagatctgcgaacatgatgcacgtgaataattttccctttagaaggcattcctggatatgctgatggtaacagcagaaaaatgtgaactctgaataaagaggtgggagtttttcagcacataaagaatatttaaagccaattcattggatgcattgaccagtaagtgtagagatcaaaatcaagaacaactccaagaattgagagcagatgcaaaccccaatttttgtgggtctccagtccagccttcccaggaatgctggtctgactactcagatttgcttttacttcttgccttttggatataatgagtttgccaagcagctgtgagtacctgactctggggaaggtggctagattccgaagcgcttatgttcatggatcaccatacgcgatcaacatgccaattgatattaagccacagaggagacgttttgatgtggacaatggcacatctgcgggacggagtcccttggatcccatgaccagcccaggatccgggctaattctccaagcaaattttgtccacagtcaacgacgggagtccttcctgtatcgatccgacagcgattatgacctctctccaaagtctatgtcccggaactcctccattgccagtgatatacacggagatgacttgattgtgactccatttgctcaggtcttggccagtctgcgaactgtacgaaacaactttgctgcattaactaatttgcaagatcgagcacctagcaaaagatcacccatgtgcaaccaaccatccatcaacaaagccaccataacagaggaggcctaccagaaactggccagcgagaccctggaggagctggactggtgtctggaccagctagagaccctacagaccaggcactccgtcagtgagatggcctccaacaagtttaaaaggatgcttaatcgggagctcacccatctctctgaaatgagtcggtctggaaatcaagtgtcagagtttatatcaaacacattcttagataagcaacatgaagtggaaattccttctccaactcagaaggaaaaggagaaaaagaaaagaccaatgtctcagatcagtggagtcaagaaattgatgcacagctctagtctgactaattcaagtatcccaaggtttggagttaaaactgaacaagaagatgtccttgccaaggaactagaagatgtgaacaaatggggtcttcatgttttcagaatagcagagttgtctggtaaccggcccttgactgttatcatgcacaccatttttcaggaacgggatttattaaaaacatttaaaattccagtagatactttaattacatatcttatgactctcgaagaccattaccatgctgatgtggcctatcacaacaatatccatgctgcagatgttgtccagtctactcatgtgctattatctacacctgctttggaggctgtgtttacagatttggagattcttgcagcaatttttgccagtgcaatacatgatgtagatcatcctggtgtgtccaatcaatttctgatcaatacaaactctgaacttgccttgatgtacaatgattcctcagtcttagagaaccatcatttggctgtgggctttaaattgcttcaggaagaaaactgtgacattttccagaatttgaccaaaaaacaaagacaatctttaaggaaaatggtcattgacatcgtacttgcaacagatatgtcaaaacacatgaatctactggctgatttgaagactatggttgaaactaagaaagtgacaagctctggagttcttcttcttgataattattccgataggattcaggttcttcagaatatggtgcactgtgcagatctgagcaacccaacaaagcctctccagctgtaccgccagtggacggaccggataatggaggagttcttccgccaaggagaccgagagagggaacgtggcatggagataagccccatgtgtgacaagcacaatgcttccgtggaaaaatcacaggtgggcttcatagactatattgttcatcccctctgggagacatgggcagacctcgtccaccctgacgcccaggatattttggacactttggaggacaatcgtgaatggtaccagagcacaatccctcagagcccctctcctgcacctgatgacccagaggagggccggcagggtcaaactgagaaattccagtttgaactaactttagaggaagatggtgagtcagacacggaaaaggacagtggcagtcaagtggaagaagacactagctgcagtgactccaagactctttgtactcaagactcagagtctactgaaattccccttgatgaacaggttgaagaggaggcagtaggggaagaagaggaaagccagcctgaagcctgtgtcatagatgatcgttctcctgacacgtaacagtgcaaaaactttcatgccttttttttttttaagtagaaaaattgtttccaaagtgcatgtcacatgccacaaccacggtcacacctcactgtcatctgccaggacgtttgttgaacaaaactgaccttgactactcagtccagcgctcaggaatatcgtaaccagttttttcacctccatgtcatccgagcaaggtggacatcttcacgaacagcgtttttaacaagatttcagcttggtagagctgacaaagcagataaaatctactccaaattattttcaagagagtgtgactcatcaggcagcccaaaagtttattggacttggggtttctattcctttttatttgtttgcaatattttcagaagaaaggcattgcacagagtgaacttaatggacgaagcaacaaatatgtcaagaacaggacatagcacgaatctgttaccagtaggaggaggatgagccacagaaattgcataattttctaatttcaagtcttcctgatacatgactgaatagtgtggttcagtgagctgcactgacctctacattttgtatgatatgtaaaacagattttttgtagagcttacttttattattaaatgtattgaggtattatatttaaaaaaaactatgttcagaacttcatctgccactggttatttttttctaaggagtaacttgcaagttttcagtacaaatctgtgctacactggataaaaatctaatttatgaattttacttgcaccttatagttcatagcaattaactgatttgtagtgattcattgtttgttttatataccaatgacttccatattttaaaagagaaaaacaactttatgttgcaggaaaccctttttgtaagtctttattatttactttgcattttgtttcactctttccagataagcagagttgctcttcaccagtgtttttcttcatgtgcaaagtgactatttgttctataatacttttatgtgtgttatatcaaatgtgtcttaagcttcatgcaaactcagtcatcagttcgtgttgtctgaagcaagtgggagatatataaatacccagtagctaaaatggtcagtcttttttagatgttttcctacttagtatctcctaataacgttttgctgtgtcactagatgttcatttcacaagtgcatgtctttctaataatccacacatttcatgctctaataatccacacatttcatgctcatttttattgtttttacagccagttatagtaagaaaaaggtttttccccttgtgctgctttataatttagcgtgtgtctgaaccttatccatgtttgctagatgaggtcttgtcaaatatatcactaccattgtcaccggtgaaaagaaacaggtagttaagttagggttaacattcatttcaaccacgaggttgtatatcatgactagcttttactcttggtttacagagaaaagttaaacagccaactaggcagtttttaagaatattaacaatatattaacaaacaccaatacaactaatcctatttggttttaatgatttcaccatgggattaagaactatatcaggaacatccctgagaaacggttttaagtgtagcaactactcttccttaatggacagccacataacgtgtaggaagtcctttatcacttatcctcgatccataagcatatcttgcagaggggaactacttctttaaacacatggagggaaagaagatgatgccactggcaccagagggttagtactgtgatgcatcctaaaatatttattatattggtaaaaattctggttaaataaaaaattagagatcactcttggctgatttcagcaccaggaactgtattacagttttagagattaattcctagtgtttacctgattatagcagttggcatcatggggcatttaattctgactttatccccacgtcagccttaataaagtcttctttaccttctctatgaagactttaaagcccaaataatcatttttcacattgatattcaagaattgagatagatagaagccaaagtgggtatctgacaagtggaaaatcaaacgtttaagaagaattacaactctgaaaagcatttatatgtggaacttctcaaggagcctcctggggactggaaagtaagtcatcagccaggcaaatgactcatgctgaagagagtccccatttcagtcccctgagatctagctgatgcttagatcctttgaaataaaaattatgtctttataactctgatcttttacataaagcagaagaggaatcaactagttaattgcaaggtttctactctgtttcctctgtaaagatcagatggtaatctttcaaataagaaaaaaataaagacgtatgtttgaccaagtagtttcacaagaatatttgggaacttgtttcttttaattttatttgtccctgagtgaagtctagaaagaaaggtaaagagtctagagtttattcctctttccaaaacattctcattcctctcctccctacacttagtatttcccccacagagtgcctagaatcttaataatgaataaaataaaaagcagcaatatgtcattaacaaatccagacctgaaagggtaaagggtttataactgcactaataaagagaggctctttttttttcttccagtttgttggtttttaatggtaccgtgttgtaaagatacccactaatggacaatcaaattgcagaaaaggctcaatatccaagagacagggactaatgcactgtacaatctgcttatccttgcccttctctcttgccaaagtgtgcttcagaaatatatactgctttaaaaaagaataaaagaatatccttttacaagtggctttacatttcctaaaatgccataagaaaatgcaatatctgggtactgtatggggaaaaaaatgtccaagtttgtgtaaaaccagtgcatttcagcttgcaagttactgaacacaataatgctgttttaattttgttttatatcagttaaaattcacaataatgtagatagaacaaattacagacaaggaaagaaaaaacttgaatgaaatggattttacagaaagctttatgataatttttgaatgcattatttattttttgtgccatgcattttttttctcaccaaatgaccttacctgtaatacagtcttgtttgtctgtttacaaccatgtatttattgcaatgtacatactgtaatgttaattgtaaattatctgttcttattaaaacatcatcccatgatgggatggtgttgatatatttggaaactcttggtgagagaatgaatggtgtgtatacatactctgtacatttttcttttctcctgtaatatagtcttgtcaccttagagcttgtttatggaagattcaagaaaactataaaatacttaaagatatataaatttaaaaaaacatagctgcaggtctttggtcccagggctgtgccttaactttaaccaatattttcttctgttttgctgcatttgaaaggtaacagtggagctagggctgggcattttacatccaggcttttaattgattagaattctgccaataggtggattttacaaaaccacagacaacctctgaaagattctgagacccttttgagacagaagctcttaagtacttcttgccagggagcagcactgcatgtgtgatggttgtttgccatctgttgatcaggaactacttcagctacttgcatttgattatttcctttttttttttttttaactcggaaacacaactggggaaatatattctttcccagtgattataaacaatctttttcttttttttaagtccttttggcttctagagctcataggaaaatggacttgatttgaaattggagccagagtttactcgtgttggttatctattcatcagcttcctgacatgttaagagaatacattaaagagaaaatactgttttttaatcctaaaatttttcttccactaagataaaccaaatgtccttacatatatgtaaacccatctatttaaacgcaaaggtgggttgatgtcagtttacatagcagaaagcattcactatcctctaagatttgtttctgcaaaactttcattgctttagaattttaaaatttcaccttgtacaatggccagcccctaaagcaggaaacatttataatggattatatggaaacatcctcccagtacttgcccagcccttgaatcatgtggcttttcagtgaaaggaaagattctttttctaggaaaaatgagcctattttattttattttattttattttttgacacaaactgtagattttagcagccctggcccaaaggaatttgattacttttgttttaaacagtacaaaggggacactataattacaaaaacatccttaactgatttgagttgtttttatttctttggatatattttcagagtggtaaattgtgtgtgagaattacaaatgattattcttttagtggtttcttagcctctcttacagcccacggggatagtactgtacatcaataccttcatatgaaatttttatatgcaatgaaaataaaagcatgggttgattctgcctatttatgactcaatcttttacaaataaaagattattcattttaaattatagttcaatcagcatgtctcttaggatactgaacgtggttgaaatgaaaggatagtgacatcataagttagtactgatattcataaccaaataaagccaacttgagtaattttgctacattaaaaattaccaaaattacttagatggcctataagattaagcatggtgttttctaagcaagctttgaaaggggccttccatacttacttaattgaatattctgggatattgaaaattattcagatacttgacaattatttttggttacctactccgcaaactacaaagttttaaggactcaacaataagttaatgagacacagtgtttgctttcatggagcttacagtctggaggggacaaaggcttaaacaatactcatataattatatatgtgatcagtacaatgaaggagctcagtggggtaaataagcaggaacctgaacttgatctgttccggagggccacagaaggcttccttgaggccttgagaaagtgatttgcatctgagttctgaaggattgtaagaggtaactagggaaaaagttgacaggaagaggaaggggatccagacaagaaacatttgcaaagatcttgaggcataaatgagcttgagacatctggagaaactgaggaaaagtgagagagtaggcagggcctggagccgcagagccattgctaaccatcctgtgtgagatatcccccattctgtagctttattctcataaccctgctcaattttctttataacacttctcacagatttatatacgtgtttgtttttgttatctgtctctcccaccagaccacagctccatgagagcaaggtctttgcttaccaatatatcactagcacttaaaactatgcctggtacacagtaggttcttaatatgtgttgaatatagccatcaaattgatattggatataattcaatctgataagatattttgagatattaaagagtttttaacttgataccataaaaaaaaaaaaaaaaa

SEQ ID NO: 93 - DNA, 8203 bp, Homo sapiens
gcggcgcattagttccaatagtttaacaggctgctttgtagcacggacaaagccgtgcgagcgcggtgctttccctccttgttcatttgctatgcgagcttgtcagtgatctttggcaggggcttgggagaggaggggtgacgtttaatacgcttccgcggaggagtgcgctcgcctcctctgcacccagccccaggctctacagagagactgaggcaggcgactgaatgcactaacagcagcaggctcagacctgcttccctggacatttccgggaccgtgagcgagggaaccacgttgccctggattcttgccagctgtacaaagttgaccaggaaaatggctcagcagacaagcccggacactttaacagtacctgaagtggataatccgcattgtccaaacccgtggctgaacgaagaccttgtgaaatccttgcgagaaaacctgttgcagcatgagaagtccaagacagcgaggaaatcggtttctcccaagctctctccagtgatctctccgagaaattcccccaggcttctgcgcagaatgcttctcagcagcaacatccccaaacagcggcgtttcacggtggcacatacatgttttgatgtggacaatggcacatctgcgggacggagtcccttggatcccatgaccagcccaggatccgggctaattctccaagcaaattttgtccacagtcaacgacgggagtccttcctgtatcgatccgacagcgattatgacctctctccaaagtctatgtcccggaactcctccattgccagtgatatacacggagatgacttgattgtgactccatttgctcaggtcttggccagtctgcgaactgtacgaaacaactttgctgcattaactaatttgcaagatcgagcacctagcaaaagatcacccatgtgcaaccaaccatccatcaacaaagccaccataacagaggaggcctaccagaaactggccagcgagaccctggaggagctggactggtgtctggaccagctagagaccctacagaccaggcactccgtcagtgagatggcctccaacaagtttaaaaggatgcttaatcgggagctcacccatctctctgaaatgagtcggtctggaaatcaagtgtcagagtttatatcaaacacattcttagataagcaacatgaagtggaaattccttctccaactcagaaggaaaaggagaaaaagaaaagaccaatgtctcagatcagtggagtcaagaaattgatgcacagctctagtctgactaattcaagtatcccaaggtttggagttaaaactgaacaagaagatgtccttgccaaggaactagaagatgtgaacaaatggggtcttcatgttttcagaatagcagagttgtctggtaaccggcccttgactgttatcatgcacaccatttttcaggaacgggatttattaaaaacatttaaaattccagtagatactttaattacatatcttatgactctcgaagaccattaccatgctgatgtggcctatcacaacaatatccatgctgcagatgttgtccagtctactcatgtgctattatctacacctgctttggaggctgtgtttacagatttggagattcttgcagcaatttttgccagtgcaatacatgatgtagatcatcctggtgtgtccaatcaatttctgatcaatacaaactctgaacttgccttgatgtacaatgattcctcagtcttagagaaccatcatttggctgtgggctttaaattgcttcaggaagaaaactgtgacattttccagaatttgaccaaaaaacaaagacaatctttaaggaaaatggtcattgacatcgtacttgcaacagatatgtcaaaacacatgaatctactggctgatttgaagactatggttgaaactaagaaagtgacaagctctggagttcttcttcttgataattattccgataggattcaggttcttcagaatatggtgcactgtgcagatctgagcaacccaacaaagcctctccagctgtaccgccagtggacggaccggataatggaggagttcttccgccaaggagaccgagagagggaacgtggcatggagataagccccatgtgtgacaagcacaatgcttccgtggaaaaatcacaggtgggcttcatagactatattgttcatcccctctgggagacatgggcagacctcgtccaccctgacgcccaggatattttggacactttggaggacaatcgtgaatggtaccagagcacaatccctcagagcccctctcctgcacctgatgacccagaggagggccggcagggtcaaactgagaaattccagtttgaactaactttagaggaagatggtgagtcagacacggaaaaggacagtggcagtcaagtggaagaagacactagctgcagtgactccaagactctttgtactcaagactcagagtctactgaaattccccttgatgaacaggttgaagaggaggcagtaggggaagaagaggaaagccagcctgaagcctgtgtcatagatgatcgttctcctgacacgtaacagtgcaaaaactttcatgccttttttttttttaagtagaaaaattgtttccaaagtgcatgtcacatgccacaaccacggtcacacctcactgtcatctgccaggacgtttgttgaacaaaactgaccttgactactcagtccagcgctcaggaatatcgtaaccagttttttcacctccatgtcatccgagcaaggtggacatcttcacgaacagcgtttttaacaagatttcagcttggtagagctgacaaagcagataaaatctactccaaattattttcaagagagtgtgactcatcaggcagcccaaaagtttattggacttggggtttctattcctttttatttgtttgcaatattttcagaagaaaggcattgcacagagtgaacttaatggacgaagcaacaaatatgtcaagaacaggacatagcacgaatctgttaccagtaggaggaggatgagccacagaaattgcataattttctaatttcaagtcttcctgatacatgactgaatagtgtggttcagtgagctgcactgacctctacattttgtatgatatgtaaaacagattttttgtagagcttacttttattattaaatgtattgaggtattatatttaaaaaaaactatgttcagaacttcatctgccactggttatttttttctaaggagtaacttgcaagttttcagtacaaatctgtgctacactggataaaaatctaatttatgaattttacttgcaccttatagttcatagcaattaactgatttgtagtgattcattgtttgttttatataccaatgacttccatattttaaaagagaaaaacaactttatgttgcaggaaaccctttttgtaagtctttattatttactttgcattttgtttcactctttccagataagcagagttgctcttcaccagtgtttttcttcatgtgcaaagtgactatttgttctataatacttttatgtgtgttatatcaaatgtgtcttaagcttcatgcaaactcagtcatcagttcgtgttgtctgaagcaagtgggagatatataaatacccagtagctaaaatggtcagtcttttttagatgttttcctacttagtatctcctaataacgttttgctgtgtcactagatgttcatttcacaagtgcatgtctttctaataatccacacatttcatgctctaataatccacacatttcatgctcatttttattgtttttacagccagttatagtaagaaaaaggtttttccccttgtgctgctttataatttagcgtgtgtctgaaccttatccatgtttgctagatgaggtcttgtcaaatatatcactaccattgtcaccggtgaaaagaaacaggtagttaagttagggttaacattcatttcaaccacgaggttgtatatcatgactagcttttactcttggtttacagagaaaagttaaacagccaactaggcagtttttaagaatattaacaatatattaacaaacaccaatacaactaatcctatttggttttaatgatttcaccatgggattaagaactatatcaggaacatccctgagaaacggttttaagtgtagcaactactcttccttaatggacagccacataacgtgtaggaagtcctttatcacttatcctcgatccataagcatatcttgcagaggggaactacttctttaaacacatggagggaaagaagatgatgccactggcaccagagggttagtactgtgatgcatcctaaaatatttattatattggtaaaaattctggttaaataaaaaattagagatcactcttggctgatttcagcaccaggaactgtattacagttttagagattaattcctagtgtttacctgattatagcagttggcatcatggggcatttaattctgactttatccccacgtcagccttaataaagtcttctttaccttctctatgaagactttaaagcccaaataatcatttttcacattgatattcaagaattgagatagatagaagccaaagtgggtatctgacaagtggaaaatcaaacgtttaagaagaattacaactctgaaaagcatttatatgtggaacttctcaaggagcctcctggggactggaaagtaagtcatcagccaggcaaatgactcatgctgaagagagtccccatttcagtcccctgagatctagctgatgcttagatcctttgaaataaaaattatgtctttataactctgatcttttacataaagcagaagaggaatcaactagttaattgcaaggtttctactctgtttcctctgtaaagatcagatggtaatctttcaaataagaaaaaaataaagacgtatgtttgaccaagtagtttcacaagaatatttgggaacttgtttcttttaattttatttgtccctgagtgaagtctagaaagaaaggtaaagagtctagagtttattcctctttccaaaacattctcattcctctcctccctacacttagtatttcccccacagagtgcctagaatcttaataatgaataaaataaaaagcagcaatatgtcattaacaaatccagacctgaaagggtaaagggtttataactgcactaataaagagaggctctttttttttcttccagtttgttggtttttaatggtaccgtgttgtaaagatacccactaatggacaatcaaattgcagaaaaggctcaatatccaagagacagggactaatgcactgtacaatctgcttatccttgcccttctctcttgccaaagtgtgcttcagaaatatatactgctttaaaaaagaataaaagaatatccttttacaagtggctttacatttcctaaaatgccataagaaaatgcaatatctgggtactgtatggggaaaaaaatgtccaagtttgtgtaaaaccagtgcatttcagcttgcaagttactgaacacaataatgctgttttaattttgttttatatcagttaaaattcacaataatgtagatagaacaaattacagacaaggaaagaaaaaacttgaatgaaatggattttacagaaagctttatgataatttttgaatgcattatttattttttgtgccatgcattttttttctcaccaaatgaccttacctgtaatacagtcttgtttgtctgtttacaaccatgtatttattgcaatgtacatactgtaatgttaattgtaaattatctgttcttattaaaacatcatcccatgatgggatggtgttgatatatttggaaactcttggtgagagaatgaatggtgtgtatacatactctgtacatttttcttttctcctgtaatatagtcttgtcaccttagagcttgtttatggaagattcaagaaaactataaaatacttaaagatatataaatttaaaaaaacatagctgcaggtctttggtcccagggctgtgccttaactttaaccaatattttcttctgttttgctgcatttgaaaggtaacagtggagctagggctgggcattttacatccaggcttttaattgattagaattctgccaataggtggattttacaaaaccacagacaacctctgaaagattctgagacccttttgagacagaagctcttaagtacttcttgccagggagcagcactgcatgtgtgatggttgtttgccatctgttgatcaggaactacttcagctacttgcatttgattatttcctttttttttttttttaactcggaaacacaactggggaaatatattctttcccagtgattataaacaatctttttcttttttttaagtccttttggcttctagagctcataggaaaatggacttgatttgaaattggagccagagtttactcgtgttggttatctattcatcagcttcctgacatgttaagagaatacattaaagagaaaatactgttttttaatcctaaaatttttcttccactaagataaaccaaatgtccttacatatatgtaaacccatctatttaaacgcaaaggtgggttgatgtcagtttacatagcagaaagcattcactatcctctaagatttgtttctgcaaaactttcattgctttagaattttaaaatttcaccttgtacaatggccagcccctaaagcaggaaacatttataatggattatatggaaacatcctcccagtacttgcccagcccttgaatcatgtggcttttcagtgaaaggaaagattctttttctaggaaaaatgagcctattttattttattttattttattttttgacacaaactgtagattttagcagccctggcccaaaggaatttgattacttttgttttaaacagtacaaaggggacactataattacaaaaacatccttaactgatttgagttgtttttatttctttggatatattttcagagtggtaaattgtgtgtgagaattacaaatgattattcttttagtggtttcttagcctctcttacagcccacggggatagtactgtacatcaataccttcatatgaaatttttatatgcaatgaaaataaaagcatgggttgattctgcctatttatgactcaatcttttacaaataaaagattattcattttaaattatagttcaatcagcatgtctcttaggatactgaacgtggttgaaatgaaaggatagtgacatcataagttagtactgatattcataaccaaataaagccaacttgagtaattttgctacattaaaaattaccaaaattacttagatggcctataagattaagcatggtgttttctaagcaagctttgaaaggggccttccatacttacttaattgaatattctgggatattgaaaattattcagatacttgacaattatttttggttacctactccgcaaactacaaagttttaaggactcaacaataagttaatgagacacagtgtttgctttcatggagcttacagtctggaggggacaaaggcttaaacaatactcatataattatatatgtgatcagtacaatgaaggagctcagtggggtaaataagcaggaacctgaacttgatctgttccggagggccacagaaggcttccttgaggccttgagaaagtgatttgcatctgagttctgaaggattgtaagaggtaactagggaaaaagttgacaggaagaggaaggggatccagacaagaaacatttgcaaagatcttgaggcataaatgagcttgagacatctggagaaactgaggaaaagtgagagagtaggcagggcctggagccgcagagccattgctaaccatcctgtgtgagatatcccccattctgtagctttattctcataaccctgctcaattttctttataacacttctcacagatttatatacgtgtttgtttttgttatctgtctctcccaccagaccacagctccatgagagcaaggtctttgcttaccaatatatcactagcacttaaaactatgcctggtacacagtaggttcttaatatgtgttgaatatagccatcaaattgatattggatataattcaatctgataagatattttgagatattaaagagtttttaacttgataccataaaaa

SEQ ID NO: 94 - DNA, 7783 bp, Homo sapiens
aatacttgttgcaataattgcccacgatagctgctcaaacaagagagttggaattcatctgtaaaaatcactacatgtaacgtaggagacaagaaaaatattaatgacagaagatctgcgaacatgatgcacgtgaataattttccctttagaaggcattcctggatatgttttgatgtggacaatggcacatctgcgggacggagtcccttggatcccatgaccagcccaggatccgggctaattctccaagcaaattttgtccacagtcaacgacgggagtccttcctgtatcgatccgacagcgattatgacctctctccaaagtctatgtcccggaactcctccattgccagtgatatacacggagatgacttgattgtgactccatttgctcaggtcttggccagtctgcgaactgtacgaaacaactttgctgcattaactaatttgcaagatcgagcacctagcaaaagatcacccatgtgcaaccaaccatccatcaacaaagccaccataacagaggaggcctaccagaaactggccagcgagaccctggaggagctggactggtgtctggaccagctagagaccctacagaccaggcactccgtcagtgagatggcctccaacaagtttaaaaggatgcttaatcgggagctcacccatctctctgaaatgagtcggtctggaaatcaagtgtcagagtttatatcaaacacattcttagataagcaacatgaagtggaaattccttctccaactcagaaggaaaaggagaaaaagaaaagaccaatgtctcagatcagtggagtcaagaaattgatgcacagctctagtctgactaattcaagtatcccaaggtttggagttaaaactgaacaagaagatgtccttgccaaggaactagaagatgtgaacaaatggggtcttcatgttttcagaatagcagagttgtctggtaaccggcccttgactgttatcatgcacaccatttttcaggaacgggatttattaaaaacatttaaaattccagtagatactttaattacatatcttatgactctcgaagaccattaccatgctgatgtggcctatcacaacaatatccatgctgcagatgttgtccagtctactcatgtgctattatctacacctgctttggaggctgtgtttacagatttggagattcttgcagcaatttttgccagtgcaatacatgatgtagatcatcctggtgtgtccaatcaatttctgatcaatacaaactctgaacttgccttgatgtacaatgattcctcagtcttagagaaccatcatttggctgtgggctttaaattgcttcaggaagaaaactgtgacattttccagaatttgaccaaaaaacaaagacaatctttaaggaaaatggtcattgacatcgtacttgcaacagatatgtcaaaacacatgaatctactggctgatttgaagactatggttgaaactaagaaagtgacaagctctggagttcttcttcttgataattattccgataggattcaggttcttcagaatatggtgcactgtgcagatctgagcaacccaacaaagcctctccagctgtaccgccagtggacggaccggataatggaggagttcttccgccaaggagaccgagagagggaacgtggcatggagataagccccatgtgtgacaagcacaatgcttccgtggaaaaatcacaggtgggcttcatagactatattgttcatcccctctgggagacatgggcagacctcgtccaccctgacgcccaggatattttggacactttggaggacaatcgtgaatggtaccagagcacaatccctcagagcccctctcctgcacctgatgacccagaggagggccggcagggtcaaactgagaaattccagtttgaactaactttagaggaagatggtgagtcagacacggaaaaggacagtggcagtcaagtggaagaagacactagctgcagtgactccaagactctttgtactcaagactcagagtctactgaaattccccttgatgaacaggttgaagaggaggcagtaggggaagaagaggaaagccagcctgaagcctgtgtcatagatgatcgttctcctgacacgtaacagtgcaaaaactttcatgccttttttttttttaagtagaaaaattgtttccaaagtgcatgtcacatgccacaaccacggtcacacctcactgtcatctgccaggacgtttgttgaacaaaactgaccttgactactcagtccagcgctcaggaatatcgtaaccagttttttcacctccatgtcatccgagcaaggtggacatcttcacgaacagcgtttttaacaagatttcagcttggtagagctgacaaagcagataaaatctactccaaattattttcaagagagtgtgactcatcaggcagcccaaaagtttattggacttggggtttctattcctttttatttgtttgcaatattttcagaagaaaggcattgcacagagtgaacttaatggacgaagcaacaaatatgtcaagaacaggacatagcacgaatctgttaccagtaggaggaggatgagccacagaaattgcataattttctaatttcaagtcttcctgatacatgactgaatagtgtggttcagtgagctgcactgacctctacattttgtatgatatgtaaaacagattttttgtagagcttacttttattattaaatgtattgaggtattatatttaaaaaaaactatgttcagaacttcatctgccactggttatttttttctaaggagtaacttgcaagttttcagtacaaatctgtgctacactggataaaaatctaatttatgaattttacttgcaccttatagttcatagcaattaactgatttgtagtgattcattgtttgttttatataccaatgacttccatattttaaaagagaaaaacaactttatgttgcaggaaaccctttttgtaagtctttattatttactttgcattttgtttcactctttccagataagcagagttgctcttcaccagtgtttttcttcatgtgcaaagtgactatttgttctataatacttttatgtgtgttatatcaaatgtgtcttaagcttcatgcaaactcagtcatcagttcgtgttgtctgaagcaagtgggagatatataaatacccagtagctaaaatggtcagtcttttttagatgttttcctacttagtatctcctaataacgttttgctgtgtcactagatgttcatttcacaagtgcatgtctttctaataatccacacatttcatgctctaataatccacacatttcatgctcatttttattgtttttacagccagttatagtaagaaaaaggtttttccccttgtgctgctttataatttagcgtgtgtctgaaccttatccatgtttgctagatgaggtcttgtcaaatatatcactaccattgtcaccggtgaaaagaaacaggtagttaagttagggttaacattcatttcaaccacgaggttgtatatcatgactagcttttactcttggtttacagagaaaagttaaacagccaactaggcagtttttaagaatattaacaatatattaacaaacaccaatacaactaatcctatttggttttaatgatttcaccatgggattaagaactatatcaggaacatccctgagaaacggttttaagtgtagcaactactcttccttaatggacagccacataacgtgtaggaagtcctttatcacttatcctcgatccataagcatatcttgcagaggggaactacttctttaaacacatggagggaaagaagatgatgccactggcaccagagggttagtactgtgatgcatcctaaaatatttattatattggtaaaaattctggttaaataaaaaattagagatcactcttggctgatttcagcaccaggaactgtattacagttttagagattaattcctagtgtttacctgattatagcagttggcatcatggggcatttaattctgactttatccccacgtcagccttaataaagtcttctttaccttctctatgaagactttaaagcccaaataatcatttttcacattgatattcaagaattgagatagatagaagccaaagtgggtatctgacaagtggaaaatcaaacgtttaagaagaattacaactctgaaaagcatttatatgtggaacttctcaaggagcctcctggggactggaaagtaagtcatcagccaggcaaatgactcatgctgaagagagtccccatttcagtcccctgagatctagctgatgcttagatcctttgaaataaaaattatgtctttataactctgatcttttacataaagcagaagaggaatcaactagttaattgcaaggtttctactctgtttcctctgtaaagatcagatggtaatctttcaaataagaaaaaaataaagacgtatgtttgaccaagtagtttcacaagaatatttgggaacttgtttcttttaattttatttgtccctgagtgaagtctagaaagaaaggtaaagagtctagagtttattcctctttccaaaacattctcattcctctcctccctacacttagtatttcccccacagagtgcctagaatcttaataatgaataaaataaaaagcagcaatatgtcattaacaaatccagacctgaaagggtaaagggtttataactgcactaataaagagaggctctttttttttcttccagtttgttggtttttaatggtaccgtgttgtaaagatacccactaatggacaatcaaattgcagaaaaggctcaatatccaagagacagggactaatgcactgtacaatctgcttatccttgcccttctctcttgccaaagtgtgcttcagaaatatatactgctttaaaaaagaataaaagaatatccttttacaagtggctttacatttcctaaaatgccataagaaaatgcaatatctgggtactgtatggggaaaaaaatgtccaagtttgtgtaaaaccagtgcatttcagcttgcaagttactgaacacaataatgctgttttaattttgttttatatcagttaaaattcacaataatgtagatagaacaaattacagacaaggaaagaaaaaacttgaatgaaatggattttacagaaagctttatgataatttttgaatgcattatttattttttgtgccatgcattttttttctcaccaaatgaccttacctgtaatacagtcttgtttgtctgtttacaaccatgtatttattgcaatgtacatactgtaatgttaattgtaaattatctgttcttattaaaacatcatcccatgatgggatggtgttgatatatttggaaactcttggtgagagaatgaatggtgtgtatacatactctgtacatttttcttttctcctgtaatatagtcttgtcaccttagagcttgtttatggaagattcaagaaaactataaaatacttaaagatatataaatttaaaaaaacatagctgcaggtctttggtcccagggctgtgccttaactttaaccaatattttcttctgttttgctgcatttgaaaggtaacagtggagctagggctgggcattttacatccaggcttttaattgattagaattctgccaataggtggattttacaaaaccacagacaacctctgaaagattctgagacccttttgagacagaagctcttaagtacttcttgccagggagcagcactgcatgtgtgatggttgtttgccatctgttgatcaggaactacttcagctacttgcatttgattatttcctttttttttttttttaactcggaaacacaactggggaaatatattctttcccagtgattataaacaatctttttcttttttttaagtccttttggcttctagagctcataggaaaatggacttgatttgaaattggagccagagtttactcgtgttggttatctattcatcagcttcctgacatgttaagagaatacattaaagagaaaatactgttttttaatcctaaaatttttcttccactaagataaaccaaatgtccttacatatatgtaaacccatctatttaaacgcaaaggtgggttgatgtcagtttacatagcagaaagcattcactatcctctaagatttgtttctgcaaaactttcattgctttagaattttaaaatttcaccttgtacaatggccagcccctaaagcaggaaacatttataatggattatatggaaacatcctcccagtacttgcccagcccttgaatcatgtggcttttcagtgaaaggaaagattctttttctaggaaaaatgagcctattttattttattttattttattttttgacacaaactgtagattttagcagccctggcccaaaggaatttgattacttttgttttaaacagtacaaaggggacactataattacaaaaacatccttaactgatttgagttgtttttatttctttggatatattttcagagtggtaaattgtgtgtgagaattacaaatgattattcttttagtggtttcttagcctctcttacagcccacggggatagtactgtacatcaataccttcatatgaaatttttatatgcaatgaaaataaaagcatgggttgattctgcctatttatgactcaatcttttacaaataaaagattattcattttaaattatagttcaatcagcatgtctcttaggatactgaacgtggttgaaatgaaaggatagtgacatcataagttagtactgatattcataaccaaataaagccaacttgagtaattttgctacattaaaaattaccaaaattacttagatggcctataagattaagcatggtgttttctaagcaagctttgaaaggggccttccatacttacttaattgaatattctgggatattgaaaattattcagatacttgacaattatttttggttacctactccgcaaactacaaagttttaaggactcaacaataagttaatgagacacagtgtttgctttcatggagcttacagtctggaggggacaaaggcttaaacaatactcatataattatatatgtgatcagtacaatgaaggagctcagtggggtaaataagcaggaacctgaacttgatctgttccggagggccacagaaggcttccttgaggccttgagaaagtgatttgcatctgagttctgaaggattgtaagaggtaactagggaaaaagttgacaggaagaggaaggggatccagacaagaaacatttgcaaagatcttgaggcataaatgagcttgagacatctggagaaactgaggaaaagtgagagagtaggcagggcctggagccgcagagccattgctaaccatcctgtgtgagatatcccccattctgtagctttattctcataaccctgctcaattttctttataacacttctcacagatttatatacgtgtttgtttttgttatctgtctctcccaccagaccacagctccatgagagcaaggtctttgcttaccaatatatcactagcacttaaaactatgcctggtacacagtaggttcttaatatgtgttgaatatagccatcaaattgatattggatataattcaatctgataagatattttgagatattaaagagtttttaacttgataccataaaaaaaaaaaaaaaaa

SEQ ID NO: 95 - DNA, 7667 bp, Homo sapiens
acttcaagtgccgtgcagaaggctcggcaggcggggcgggcgtggggccgcggctccgggttggggaccgaggagatccggctgtggaccagacgctcctctgcggggcgggcacccaagcgcgctcgccaccccctcgccatccgctagagccgggctcctggactgggactcgggcccgccgcacagttgaaaagtcgcatagtggtttttccgctcgcgtcgctgtgtgaaagttggctcgccgctctttgcacgccctccctggaggccgacccgagacgccaagctggagagaccgtgcctccccgaggccggccgccccgcgagcacagcctccgcccccgttgcactgccgggctgggcaatatgaaggagcagccctcatgtgccggcaccgggcatccgagcatggcgggaggaggcctaccagaaactggccagcgagaccctggaggagctggactggtgtctggaccagctagagaccctacagaccaggcactccgtcagtgagatggcctccaacaagtttaaaaggatgcttaatcgggagctcacccatctctctgaaatgagtcggtctggaaatcaagtgtcagagtttatatcaaacacattcttagataagcaacatgaagtggaaattccttctccaactcagaaggaaaaggagaaaaagaaaagaccaatgtctcagatcagtggagtcaagaaattgatgcacagctctagtctgactaattcaagtatcccaaggtttggagttaaaactgaacaagaagatgtccttgccaaggaactagaagatgtgaacaaatggggtcttcatgttttcagaatagcagagttgtctggtaaccggcccttgactgttatcatgcacaccatttttcaggaacgggatttattaaaaacatttaaaattccagtagatactttaattacatatcttatgactctcgaagaccattaccatgctgatgtggcctatcacaacaatatccatgctgcagatgttgtccagtctactcatgtgctattatctacacctgctttggaggctgtgtttacagatttggagattcttgcagcaatttttgccagtgcaatacatgatgtagatcatcctggtgtgtccaatcaatttctgatcaatacaaactctgaacttgccttgatgtacaatgattcctcagtcttagagaaccatcatttggctgtgggctttaaattgcttcaggaagaaaactgtgacattttccagaatttgaccaaaaaacaaagacaatctttaaggaaaatggtcattgacatcgtacttgcaacagatatgtcaaaacacatgaatctactggctgatttgaagactatggttgaaactaagaaagtgacaagctctggagttcttcttcttgataattattccgataggattcaggttcttcagaatatggtgcactgtgcagatctgagcaacccaacaaagcctctccagctgtaccgccagtggacggaccggataatggaggagttcttccgccaaggagaccgagagagggaacgtggcatggagataagccccatgtgtgacaagcacaatgcttccgtggaaaaatcacaggtgggcttcatagactatattgttcatcccctctgggagacatgggcagacctcgtccaccctgacgcccaggatattttggacactttggaggacaatcgtgaatggtaccagagcacaatccctcagagcccctctcctgcacctgatgacccagaggagggccggcagggtcaaactgagaaattccagtttgaactaactttagaggaagatggtgagtcagacacggaaaaggacagtggcagtcaagtggaagaagacactagctgcagtgactccaagactctttgtactcaagactcagagtctactgaaattccccttgatgaacaggttgaagaggaggcagtaggggaagaagaggaaagccagcctgaagcctgtgtcatagatgatcgttctcctgacacgtaacagtgcaaaaactttcatgccttttttttttttaagtagaaaaattgtttccaaagtgcatgtcacatgccacaaccacggtcacacctcactgtcatctgccaggacgtttgttgaacaaaactgaccttgactactcagtccagcgctcaggaatatcgtaaccagttttttcacctccatgtcatccgagcaaggtggacatcttcacgaacagcgtttttaacaagatttcagcttggtagagctgacaaagcagataaaatctactccaaattattttcaagagagtgtgactcatcaggcagcccaaaagtttattggacttggggtttctattcctttttatttgtttgcaatattttcagaagaaaggcattgcacagagtgaacttaatggacgaagcaacaaatatgtcaagaacaggacatagcacgaatctgttaccagtaggaggaggatgagccacagaaattgcataattttctaatttcaagtcttcctgatacatgactgaatagtgtggttcagtgagctgcactgacctctacattttgtatgatatgtaaaacagattttttgtagagcttacttttattattaaatgtattgaggtattatatttaaaaaaaactatgttcagaacttcatctgccactggttatttttttctaaggagtaacttgcaagttttcagtacaaatctgtgctacactggataaaaatctaatttatgaattttacttgcaccttatagttcatagcaattaactgatttgtagtgattcattgtttgttttatataccaatgacttccatattttaaaagagaaaaacaactttatgttgcaggaaaccctttttgtaagtctttattatttactttgcattttgtttcactctttccagataagcagagttgctcttcaccagtgtttttcttcatgtgcaaagtgactatttgttctataatacttttatgtgtgttatatcaaatgtgtcttaagcttcatgcaaactcagtcatcagttcgtgttgtctgaagcaagtgggagatatataaatacccagtagctaaaatggtcagtcttttttagatgttttcctacttagtatctcctaataacgttttgctgtgtcactagatgttcatttcacaagtgcatgtctttctaataatccacacatttcatgctctaataatccacacatttcatgctcatttttattgtttttacagccagttatagtaagaaaaaggtttttccccttgtgctgctttataatttagcgtgtgtctgaaccttatccatgtttgctagatgaggtcttgtcaaatatatcactaccattgtcaccggtgaaaagaaacaggtagttaagttagggttaacattcatttcaaccacgaggttgtatatcatgactagcttttactcttggtttacagagaaaagttaaacagccaactaggcagtttttaagaatattaacaatatattaacaaacaccaatacaactaatcctatttggttttaatgatttcaccatgggattaagaactatatcaggaacatccctgagaaacggttttaagtgtagcaactactcttccttaatggacagccacataacgtgtaggaagtcctttatcacttatcctcgatccataagcatatcttgcagaggggaactacttctttaaacacatggagggaaagaagatgatgccactggcaccagagggttagtactgtgatgcatcctaaaatatttattatattggtaaaaattctggttaaataaaaaattagagatcactcttggctgatttcagcaccaggaactgtattacagttttagagattaattcctagtgtttacctgattatagcagttggcatcatggggcatttaattctgactttatccccacgtcagccttaataaagtcttctttaccttctctatgaagactttaaagcccaaataatcatttttcacattgatattcaagaattgagatagatagaagccaaagtgggtatctgacaagtggaaaatcaaacgtttaagaagaattacaactctgaaaagcatttatatgtggaacttctcaaggagcctcctggggactggaaagtaagtcatcagccaggcaaatgactcatgctgaagagagtccccatttcagtcccctgagatctagctgatgcttagatcctttgaaataaaaattatgtctttataactctgatcttttacataaagcagaagaggaatcaactagttaattgcaaggtttctactctgtttcctctgtaaagatcagatggtaatctttcaaataagaaaaaaataaagacgtatgtttgaccaagtagtttcacaagaatatttgggaacttgtttcttttaattttatttgtccctgagtgaagtctagaaagaaaggtaaagagtctagagtttattcctctttccaaaacattctcattcctctcctccctacacttagtatttcccccacagagtgcctagaatcttaataatgaataaaataaaaagcagcaatatgtcattaacaaatccagacctgaaagggtaaagggtttataactgcactaataaagagaggctctttttttttcttccagtttgttggtttttaatggtaccgtgttgtaaagatacccactaatggacaatcaaattgcagaaaaggctcaatatccaagagacagggactaatgcactgtacaatctgcttatccttgcccttctctcttgccaaagtgtgcttcagaaatatatactgctttaaaaaagaataaaagaatatccttttacaagtggctttacatttcctaaaatgccataagaaaatgcaatatctgggtactgtatggggaaaaaaatgtccaagtttgtgtaaaaccagtgcatttcagcttgcaagttactgaacacaataatgctgttttaattttgttttatatcagttaaaattcacaataatgtagatagaacaaattacagacaaggaaagaaaaaacttgaatgaaatggattttacagaaagctttatgataatttttgaatgcattatttattttttgtgccatgcattttttttctcaccaaatgaccttacctgtaatacagtcttgtttgtctgtttacaaccatgtatttattgcaatgtacatactgtaatgttaattgtaaattatctgttcttattaaaacatcatcccatgatgggatggtgttgatatatttggaaactcttggtgagagaatgaatggtgtgtatacatactctgtacatttttcttttctcctgtaatatagtcttgtcaccttagagcttgtttatggaagattcaagaaaactataaaatacttaaagatatataaatttaaaaaaacatagctgcaggtctttggtcccagggctgtgccttaactttaaccaatattttcttctgttttgctgcatttgaaaggtaacagtggagctagggctgggcattttacatccaggcttttaattgattagaattctgccaataggtggattttacaaaaccacagacaacctctgaaagattctgagacccttttgagacagaagctcttaagtacttcttgccagggagcagcactgcatgtgtgatggttgtttgccatctgttgatcaggaactacttcagctacttgcatttgattatttcctttttttttttttttaactcggaaacacaactggggaaatatattctttcccagtgattataaacaatctttttcttttttttaagtccttttggcttctagagctcataggaaaatggacttgatttgaaattggagccagagtttactcgtgttggttatctattcatcagcttcctgacatgttaagagaatacattaaagagaaaatactgttttttaatcctaaaatttttcttccactaagataaaccaaatgtccttacatatatgtaaacccatctatttaaacgcaaaggtgggttgatgtcagtttacatagcagaaagcattcactatcctctaagatttgtttctgcaaaactttcattgctttagaattttaaaatttcaccttgtacaatggccagcccctaaagcaggaaacatttataatggattatatggaaacatcctcccagtacttgcccagcccttgaatcatgtggcttttcagtgaaaggaaagattctttttctaggaaaaatgagcctattttattttattttattttattttttgacacaaactgtagattttagcagccctggcccaaaggaatttgattacttttgttttaaacagtacaaaggggacactataattacaaaaacatccttaactgatttgagttgtttttatttctttggatatattttcagagtggtaaattgtgtgtgagaattacaaatgattattcttttagtggtttcttagcctctcttacagcccacggggatagtactgtacatcaataccttcatatgaaatttttatatgcaatgaaaataaaagcatgggttgattctgcctatttatgactcaatcttttacaaataaaagattattcattttaaattatagttcaatcagcatgtctcttaggatactgaacgtggttgaaatgaaaggatagtgacatcataagttagtactgatattcataaccaaataaagccaacttgagtaattttgctacattaaaaattaccaaaattacttagatggcctataagattaagcatggtgttttctaagcaagctttgaaaggggccttccatacttacttaattgaatattctgggatattgaaaattattcagatacttgacaattatttttggttacctactccgcaaactacaaagttttaaggactcaacaataagttaatgagacacagtgtttgctttcatggagcttacagtctggaggggacaaaggcttaaacaatactcatataattatatatgtgatcagtacaatgaaggagctcagtggggtaaataagcaggaacctgaacttgatctgttccggagggccacagaaggcttccttgaggccttgagaaagtgatttgcatctgagttctgaaggattgtaagaggtaactagggaaaaagttgacaggaagaggaaggggatccagacaagaaacatttgcaaagatcttgaggcataaatgagcttgagacatctggagaaactgaggaaaagtgagagagtaggcagggcctggagccgcagagccattgctaaccatcctgtgtgagatatcccccattctgtagctttattctcataaccctgctcaattttctttataacacttctcacagatttatatacgtgtttgtttttgttatctgtctctcccaccagaccacagctccatgagagcaaggtctttgcttaccaatatatcactagcacttaaaactatgcctggtacacagtaggttcttaatatgtgttgaatatagccatcaaattgatattggatataattcaatctgataagatattttgagatattaaagagtttttaacttgataccataaaaa

SEQ ID NO: 96 - DNA, 8379 bp, Homo sapiens
cactgccctgcggtgttttgaactgccttcttacagacgtcatacagcccttgaggaatagtttctgcctggtgagattgaatgatagttctcattcacaaaaccctggattctaagcagggacacacagaaattactttcgcaggtaaatcagcccacccagccaaagtgtggagagatttgttccttggctgacttctttgctccacggagaggagtgttttcctgtgcttgccctgaaatggaacttccttgacagctctcccgtgttacagtacctcccggtcattttctttttctctctctctacctgcgctcttcgagtgtcagaaacctttaaagctgttactatggaattgcaaaaaagagatcaagtgactctttcactatgctggtttcccttgtgacccagatgaagaatcaattcagaattcagttcctcccttggcattgcaagacacagaagaaactgtcacttcctaacagcctagtactggagtaaattcagtatgaaggaagaaagcgctcctgcgtgttagaaccttgcccatgagctggaccgaggacaggagatggactccaggaaaattggatttcttcaagcagcctcccttggaaatggaatatctttaaaatcttctttgcagaaagacagttagaatgtattaatcagaatagttgaagacttattttcctttttattttttttcaaaatgagcattattatgaagccaagatcccgatctacaagttccctaaggactgcagaggcagtttgttttgatgtggacaatggcacatctgcgggacggagtcccttggatcccatgaccagcccaggatccgggctaattctccaagcaaattttgtccacagtcaacgacgggagtccttcctgtatcgatccgacagcgattatgacctctctccaaagtctatgtcccggaactcctccattgccagtgatatacacggagatgacttgattgtgactccatttgctcaggtcttggccagtctgcgaactgtacgaaacaactttgctgcattaactaatttgcaagatcgagcacctagcaaaagatcacccatgtgcaaccaaccatccatcaacaaagccaccataacagaggaggcctaccagaaactggccagcgagaccctggaggagctggactggtgtctggaccagctagagaccctacagaccaggcactccgtcagtgagatggcctccaacaagtttaaaaggatgcttaatcgggagctcacccatctctctgaaatgagtcggtctggaaatcaagtgtcagagtttatatcaaacacattcttagataagcaacatgaagtggaaattccttctccaactcagaaggaaaaggagaaaaagaaaagaccaatgtctcagatcagtggagtcaagaaattgatgcacagctctagtctgactaattcaagtatcccaaggtttggagttaaaactgaacaagaagatgtccttgccaaggaactagaagatgtgaacaaatggggtcttcatgttttcagaatagcagagttgtctggtaaccggcccttgactgttatcatgcacaccatttttcaggaacgggatttattaaaaacatttaaaattccagtagatactttaattacatatcttatgactctcgaagaccattaccatgctgatgtggcctatcacaacaatatccatgctgcagatgttgtccagtctactcatgtgctattatctacacctgctttggaggctgtgtttacagatttggagattcttgcagcaatttttgccagtgcaatacatgatgtagatcatcctggtgtgtccaatcaatttctgatcaatacaaactctgaacttgccttgatgtacaatgattcctcagtcttagagaaccatcatttggctgtgggctttaaattgcttcaggaagaaaactgtgacattttccagaatttgaccaaaaaacaaagacaatctttaaggaaaatggtcattgacatcgtacttgcaacagatatgtcaaaacacatgaatctactggctgatttgaagactatggttgaaactaagaaagtgacaagctctggagttcttcttcttgataattattccgataggattcaggttcttcagaatatggtgcactgtgcagatctgagcaacccaacaaagcctctccagctgtaccgccagtggacggaccggataatggaggagttcttccgccaaggagaccgagagagggaacgtggcatggagataagccccatgtgtgacaagcacaatgcttccgtggaaaaatcacaggtgggcttcatagactatattgttcatcccctctgggagacatgggcagacctcgtccaccctgacgcccaggatattttggacactttggaggacaatcgtgaatggtaccagagcacaatccctcagagcccctctcctgcacctgatgacccagaggagggccggcagggtcaaactgagaaattccagtttgaactaactttagaggaagatggtgagtcagacacggaaaaggacagtggcagtcaagtggaagaagacactagctgcagtgactccaagactctttgtactcaagactcagagtctactgaaattccccttgatgaacaggttgaagaggaggcagtaggggaagaagaggaaagccagcctgaagcctgtgtcatagatgatcgttctcctgacacgtaacagtgcaaaaactttcatgccttttttttttttaagtagaaaaattgtttccaaagtgcatgtcacatgccacaaccacggtcacacctcactgtcatctgccaggacgtttgttgaacaaaactgaccttgactactcagtccagcgctcaggaatatcgtaaccagttttttcacctccatgtcatccgagcaaggtggacatcttcacgaacagcgtttttaacaagatttcagcttggtagagctgacaaagcagataaaatctactccaaattattttcaagagagtgtgactcatcaggcagcccaaaagtttattggacttggggtttctattcctttttatttgtttgcaatattttcagaagaaaggcattgcacagagtgaacttaatggacgaagcaacaaatatgtcaagaacaggacatagcacgaatctgttaccagtaggaggaggatgagccacagaaattgcataattttctaatttcaagtcttcctgatacatgactgaatagtgtggttcagtgagctgcactgacctctacattttgtatgatatgtaaaacagattttttgtagagcttacttttattattaaatgtattgaggtattatatttaaaaaaaactatgttcagaacttcatctgccactggttatttttttctaaggagtaacttgcaagttttcagtacaaatctgtgctacactggataaaaatctaatttatgaattttacttgcaccttatagttcatagcaattaactgatttgtagtgattcattgtttgttttatataccaatgacttccatattttaaaagagaaaaacaactttatgttgcaggaaaccctttttgtaagtctttattatttactttgcattttgtttcactctttccagataagcagagttgctcttcaccagtgtttttcttcatgtgcaaagtgactatttgttctataatacttttatgtgtgttatatcaaatgtgtcttaagcttcatgcaaactcagtcatcagttcgtgttgtctgaagcaagtgggagatatataaatacccagtagctaaaatggtcagtcttttttagatgttttcctacttagtatctcctaataacgttttgctgtgtcactagatgttcatttcacaagtgcatgtctttctaataatccacacatttcatgctctaataatccacacatttcatgctcatttttattgtttttacagccagttatagtaagaaaaaggtttttccccttgtgctgctttataatttagcgtgtgtctgaaccttatccatgtttgctagatgaggtcttgtcaaatatatcactaccattgtcaccggtgaaaagaaacaggtagttaagttagggttaacattcatttcaaccacgaggttgtatatcatgactagcttttactcttggtttacagagaaaagttaaacagccaactaggcagtttttaagaatattaacaatatattaacaaacaccaatacaactaatcctatttggttttaatgatttcaccatgggattaagaactatatcaggaacatccctgagaaacggttttaagtgtagcaactactcttccttaatggacagccacataacgtgtaggaagtcctttatcacttatcctcgatccataagcatatcttgcagaggggaactacttctttaaacacatggagggaaagaagatgatgccactggcaccagagggttagtactgtgatgcatcctaaaatatttattatattggtaaaaattctggttaaataaaaaattagagatcactcttggctgatttcagcaccaggaactgtattacagttttagagattaattcctagtgtttacctgattatagcagttggcatcatggggcatttaattctgactttatccccacgtcagccttaataaagtcttctttaccttctctatgaagactttaaagcccaaataatcatttttcacattgatattcaagaattgagatagatagaagccaaagtgggtatctgacaagtggaaaatcaaacgtttaagaagaattacaactctgaaaagcatttatatgtggaacttctcaaggagcctcctggggactggaaagtaagtcatcagccaggcaaatgactcatgctgaagagagtccccatttcagtcccctgagatctagctgatgcttagatcctttgaaataaaaattatgtctttataactctgatcttttacataaagcagaagaggaatcaactagttaattgcaaggtttctactctgtttcctctgtaaagatcagatggtaatctttcaaataagaaaaaaataaagacgtatgtttgaccaagtagtttcacaagaatatttgggaacttgtttcttttaattttatttgtccctgagtgaagtctagaaagaaaggtaaagagtctagagtttattcctctttccaaaacattctcattcctctcctccctacacttagtatttcccccacagagtgcctagaatcttaataatgaataaaataaaaagcagcaatatgtcattaacaaatccagacctgaaagggtaaagggtttataactgcactaataaagagaggctctttttttttcttccagtttgttggtttttaatggtaccgtgttgtaaagatacccactaatggacaatcaaattgcagaaaaggctcaatatccaagagacagggactaatgcactgtacaatctgcttatccttgcccttctctcttgccaaagtgtgcttcagaaatatatactgctttaaaaaagaataaaagaatatccttttacaagtggctttacatttcctaaaatgccataagaaaatgcaatatctgggtactgtatggggaaaaaaatgtccaagtttgtgtaaaaccagtgcatttcagcttgcaagttactgaacacaataatgctgttttaattttgttttatatcagttaaaattcacaataatgtagatagaacaaattacagacaaggaaagaaaaaacttgaatgaaatggattttacagaaagctttatgataatttttgaatgcattatttattttttgtgccatgcattttttttctcaccaaatgaccttacctgtaatacagtcttgtttgtctgtttacaaccatgtatttattgcaatgtacatactgtaatgttaattgtaaattatctgttcttattaaaacatcatcccatgatgggatggtgttgatatatttggaaactcttggtgagagaatgaatggtgtgtatacatactctgtacatttttcttttctcctgtaatatagtcttgtcaccttagagcttgtttatggaagattcaagaaaactataaaatacttaaagatatataaatttaaaaaaacatagctgcaggtctttggtcccagggctgtgccttaactttaaccaatattttcttctgttttgctgcatttgaaaggtaacagtggagctagggctgggcattttacatccaggcttttaattgattagaattctgccaataggtggattttacaaaaccacagacaacctctgaaagattctgagacccttttgagacagaagctcttaagtacttcttgccagggagcagcactgcatgtgtgatggttgtttgccatctgttgatcaggaactacttcagctacttgcatttgattatttcctttttttttttttttaactcggaaacacaactggggaaatatattctttcccagtgattataaacaatctttttcttttttttaagtccttttggcttctagagctcataggaaaatggacttgatttgaaattggagccagagtttactcgtgttggttatctattcatcagcttcctgacatgttaagagaatacattaaagagaaaatactgttttttaatcctaaaatttttcttccactaagataaaccaaatgtccttacatatatgtaaacccatctatttaaacgcaaaggtgggttgatgtcagtttacatagcagaaagcattcactatcctctaagatttgtttctgcaaaactttcattgctttagaattttaaaatttcaccttgtacaatggccagcccctaaagcaggaaacatttataatggattatatggaaacatcctcccagtacttgcccagcccttgaatcatgtggcttttcagtgaaaggaaagattctttttctaggaaaaatgagcctattttattttattttattttattttttgacacaaactgtagattttagcagccctggcccaaaggaatttgattacttttgttttaaacagtacaaaggggacactataattacaaaaacatccttaactgatttgagttgtttttatttctttggatatattttcagagtggtaaattgtgtgtgagaattacaaatgattattcttttagtggtttcttagcctctcttacagcccacggggatagtactgtacatcaataccttcatatgaaatttttatatgcaatgaaaataaaagcatgggttgattctgcctatttatgactcaatcttttacaaataaaagattattcattttaaattatagttcaatcagcatgtctcttaggatactgaacgtggttgaaatgaaaggatagtgacatcataagttagtactgatattcataaccaaataaagccaacttgagtaattttgctacattaaaaattaccaaaattacttagatggcctataagattaagcatggtgttttctaagcaagctttgaaaggggccttccatacttacttaattgaatattctgggatattgaaaattattcagatacttgacaattatttttggttacctactccgcaaactacaaagttttaaggactcaacaataagttaatgagacacagtgtttgctttcatggagcttacagtctggaggggacaaaggcttaaacaatactcatataattatatatgtgatcagtacaatgaaggagctcagtggggtaaataagcaggaacctgaacttgatctgttccggagggccacagaaggcttccttgaggccttgagaaagtgatttgcatctgagttctgaaggattgtaagaggtaactagggaaaaagttgacaggaagaggaaggggatccagacaagaaacatttgcaaagatcttgaggcataaatgagcttgagacatctggagaaactgaggaaaagtgagagagtaggcagggcctggagccgcagagccattgctaaccatcctgtgtgagatatcccccattctgtagctttattctcataaccctgctcaattttctttataacacttctcacagatttatatacgtgtttgtttttgttatctgtctctcccaccagaccacagctccatgagagcaaggtctttgcttaccaatatatcactagcacttaaaactatgcctggtacacagtaggttcttaatatgtgttgaatatagccatcaaattgatattggatataattcaatctgataagatattttgagatattaaagagtttttaacttgataccataaaaa

SEQ ID NO: 97 - DNA, 7545 bp, Homo sapiens
ctttcttgcaactaagcatcttgacatacattattcattaagccctggagctcgggagagaaagatgcagacccttagatctttagatattcctttatcacgtggattttctttattcagaatagttgctgaattttgtgccattctggagtcttacaaatggcatgtattcgatgggaagacggctggatgggatttaatgcgaggctttcttatgtatacttaattaccaaaaatctttaaaaactcatactctgcgtggcttgtggaggttgttaaagtgtcgagattttgaagctaaatacattttagagcttactatatatatacatatatatatatatacatataatcaatcaaaaatgcctgaagcaaactatttactgtcagtgtcttggggctacataaagtttaaaaggatgcttaatcgggagctcacccatctctctgaaatgagtcggtctggaaatcaagtgtcagagtttatatcaaacacattcttagataagcaacatgaagtggaaattccttctccaactcagaaggaaaaggagaaaaagaaaagaccaatgtctcagatcagtggagtcaagaaattgatgcacagctctagtctgactaattcaagtatcccaaggtttggagttaaaactgaacaagaagatgtccttgccaaggaactagaagatgtgaacaaatggggtcttcatgttttcagaatagcagagttgtctggtaaccggcccttgactgttatcatgcacaccatttttcaggaacgggatttattaaaaacatttaaaattccagtagatactttaattacatatcttatgactctcgaagaccattaccatgctgatgtggcctatcacaacaatatccatgctgcagatgttgtccagtctactcatgtgctattatctacacctgctttggaggctgtgtttacagatttggagattcttgcagcaatttttgccagtgcaatacatgatgtagatcatcctggtgtgtccaatcaatttctgatcaatacaaactctgaacttgccttgatgtacaatgattcctcagtcttagagaaccatcatttggctgtgggctttaaattgcttcaggaagaaaactgtgacattttccagaatttgaccaaaaaacaaagacaatctttaaggaaaatggtcattgacatcgtacttgcaacagatatgtcaaaacacatgaatctactggctgatttgaagactatggttgaaactaagaaagtgacaagctctggagttcttcttcttgataattattccgataggattcaggttcttcagaatatggtgcactgtgcagatctgagcaacccaacaaagcctctccagctgtaccgccagtggacggaccggataatggaggagttcttccgccaaggagaccgagagagggaacgtggcatggagataagccccatgtgtgacaagcacaatgcttccgtggaaaaatcacaggtgggcttcatagactatattgttcatcccctctgggagacatgggcagacctcgtccaccctgacgcccaggatattttggacactttggaggacaatcgtgaatggtaccagagcacaatccctcagagcccctctcctgcacctgatgacccagaggagggccggcagggtcaaactgagaaattccagtttgaactaactttagaggaagatggtgagtcagacacggaaaaggacagtggcagtcaagtggaagaagacactagctgcagtgactccaagactctttgtactcaagactcagagtctactgaaattccccttgatgaacaggttgaagaggaggcagtaggggaagaagaggaaagccagcctgaagcctgtgtcatagatgatcgttctcctgacacgtaacagtgcaaaaactttcatgccttttttttttttaagtagaaaaattgtttccaaagtgcatgtcacatgccacaaccacggtcacacctcactgtcatctgccaggacgtttgttgaacaaaactgaccttgactactcagtccagcgctcaggaatatcgtaaccagttttttcacctccatgtcatccgagcaaggtggacatcttcacgaacagcgtttttaacaagatttcagcttggtagagctgacaaagcagataaaatctactccaaattattttcaagagagtgtgactcatcaggcagcccaaaagtttattggacttggggtttctattcctttttatttgtttgcaatattttcagaagaaaggcattgcacagagtgaacttaatggacgaagcaacaaatatgtcaagaacaggacatagcacgaatctgttaccagtaggaggaggatgagccacagaaattgcataattttctaatttcaagtcttcctgatacatgactgaatagtgtggttcagtgagctgcactgacctctacattttgtatgatatgtaaaacagattttttgtagagcttacttttattattaaatgtattgaggtattatatttaaaaaaaactatgttcagaacttcatctgccactggttatttttttctaaggagtaacttgcaagttttcagtacaaatctgtgctacactggataaaaatctaatttatgaattttacttgcaccttatagttcatagcaattaactgatttgtagtgattcattgtttgttttatataccaatgacttccatattttaaaagagaaaaacaactttatgttgcaggaaaccctttttgtaagtctttattatttactttgcattttgtttcactctttccagataagcagagttgctcttcaccagtgtttttcttcatgtgcaaagtgactatttgttctataatacttttatgtgtgttatatcaaatgtgtcttaagcttcatgcaaactcagtcatcagttcgtgttgtctgaagcaagtgggagatatataaatacccagtagctaaaatggtcagtcttttttagatgttttcctacttagtatctcctaataacgttttgctgtgtcactagatgttcatttcacaagtgcatgtctttctaataatccacacatttcatgctctaataatccacacatttcatgctcatttttattgtttttacagccagttatagtaagaaaaaggtttttccccttgtgctgctttataatttagcgtgtgtctgaaccttatccatgtttgctagatgaggtcttgtcaaatatatcactaccattgtcaccggtgaaaagaaacaggtagttaagttagggttaacattcatttcaaccacgaggttgtatatcatgactagcttttactcttggtttacagagaaaagttaaacagccaactaggcagtttttaagaatattaacaatatattaacaaacaccaatacaactaatcctatttggttttaatgatttcaccatgggattaagaactatatcaggaacatccctgagaaacggttttaagtgtagcaactactcttccttaatggacagccacataacgtgtaggaagtcctttatcacttatcctcgatccataagcatatcttgcagaggggaactacttctttaaacacatggagggaaagaagatgatgccactggcaccagagggttagtactgtgatgcatcctaaaatatttattatattggtaaaaattctggttaaataaaaaattagagatcactcttggctgatttcagcaccaggaactgtattacagttttagagattaattcctagtgtttacctgattatagcagttggcatcatggggcatttaattctgactttatccccacgtcagccttaataaagtcttctttaccttctctatgaagactttaaagcccaaataatcatttttcacattgatattcaagaattgagatagatagaagccaaagtgggtatctgacaagtggaaaatcaaacgtttaagaagaattacaactctgaaaagcatttatatgtggaacttctcaaggagcctcctggggactggaaagtaagtcatcagccaggcaaatgactcatgctgaagagagtccccatttcagtcccctgagatctagctgatgcttagatcctttgaaataaaaattatgtctttataactctgatcttttacataaagcagaagaggaatcaactagttaattgcaaggtttctactctgtttcctctgtaaagatcagatggtaatctttcaaataagaaaaaaataaagacgtatgtttgaccaagtagtttcacaagaatatttgggaacttgtttcttttaattttatttgtccctgagtgaagtctagaaagaaaggtaaagagtctagagtttattcctctttccaaaacattctcattcctctcctccctacacttagtatttcccccacagagtgcctagaatcttaataatgaataaaataaaaagcagcaatatgtcattaacaaatccagacctgaaagggtaaagggtttataactgcactaataaagagaggctctttttttttcttccagtttgttggtttttaatggtaccgtgttgtaaagatacccactaatggacaatcaaattgcagaaaaggctcaatatccaagagacagggactaatgcactgtacaatctgcttatccttgcccttctctcttgccaaagtgtgcttcagaaatatatactgctttaaaaaagaataaaagaatatccttttacaagtggctttacatttcctaaaatgccataagaaaatgcaatatctgggtactgtatggggaaaaaaatgtccaagtttgtgtaaaaccagtgcatttcagcttgcaagttactgaacacaataatgctgttttaattttgttttatatcagttaaaattcacaataatgtagatagaacaaattacagacaaggaaagaaaaaacttgaatgaaatggattttacagaaagctttatgataatttttgaatgcattatttattttttgtgccatgcattttttttctcaccaaatgaccttacctgtaatacagtcttgtttgtctgtttacaaccatgtatttattgcaatgtacatactgtaatgttaattgtaaattatctgttcttattaaaacatcatcccatgatgggatggtgttgatatatttggaaactcttggtgagagaatgaatggtgtgtatacatactctgtacatttttcttttctcctgtaatatagtcttgtcaccttagagcttgtttatggaagattcaagaaaactataaaatacttaaagatatataaatttaaaaaaacatagctgcaggtctttggtcccagggctgtgccttaactttaaccaatattttcttctgttttgctgcatttgaaaggtaacagtggagctagggctgggcattttacatccaggcttttaattgattagaattctgccaataggtggattttacaaaaccacagacaacctctgaaagattctgagacccttttgagacagaagctcttaagtacttcttgccagggagcagcactgcatgtgtgatggttgtttgccatctgttgatcaggaactacttcagctacttgcatttgattatttcctttttttttttttttaactcggaaacacaactggggaaatatattctttcccagtgattataaacaatctttttcttttttttaagtccttttggcttctagagctcataggaaaatggacttgatttgaaattggagccagagtttactcgtgttggttatctattcatcagcttcctgacatgttaagagaatacattaaagagaaaatactgttttttaatcctaaaatttttcttccactaagataaaccaaatgtccttacatatatgtaaacccatctatttaaacgcaaaggtgggttgatgtcagtttacatagcagaaagcattcactatcctctaagatttgtttctgcaaaactttcattgctttagaattttaaaatttcaccttgtacaatggccagcccctaaagcaggaaacatttataatggattatatggaaacatcctcccagtacttgcccagcccttgaatcatgtggcttttcagtgaaaggaaagattctttttctaggaaaaatgagcctattttattttattttattttattttttgacacaaactgtagattttagcagccctggcccaaaggaatttgattacttttgttttaaacagtacaaaggggacactataattacaaaaacatccttaactgatttgagttgtttttatttctttggatatattttcagagtggtaaattgtgtgtgagaattacaaatgattattcttttagtggtttcttagcctctcttacagcccacggggatagtactgtacatcaataccttcatatgaaatttttatatgcaatgaaaataaaagcatgggttgattctgcctatttatgactcaatcttttacaaataaaagattattcattttaaattatagttcaatcagcatgtctcttaggatactgaacgtggttgaaatgaaaggatagtgacatcataagttagtactgatattcataaccaaataaagccaacttgagtaattttgctacattaaaaattaccaaaattacttagatggcctataagattaagcatggtgttttctaagcaagctttgaaaggggccttccatacttacttaattgaatattctgggatattgaaaattattcagatacttgacaattatttttggttacctactccgcaaactacaaagttttaaggactcaacaataagttaatgagacacagtgtttgctttcatggagcttacagtctggaggggacaaaggcttaaacaatactcatataattatatatgtgatcagtacaatgaaggagctcagtggggtaaataagcaggaacctgaacttgatctgttccggagggccacagaaggcttccttgaggccttgagaaagtgatttgcatctgagttctgaaggattgtaagaggtaactagggaaaaagttgacaggaagaggaaggggatccagacaagaaacatttgcaaagatcttgaggcataaatgagcttgagacatctggagaaactgaggaaaagtgagagagtaggcagggcctggagccgcagagccattgctaaccatcctgtgtgagatatcccccattctgtagctttattctcataaccctgctcaattttctttataacacttctcacagatttatatacgtgtttgtttttgttatctgtctctcccaccagaccacagctccatgagagcaaggtctttgcttaccaatatatcactagcacttaaaactatgcctggtacacagtaggttcttaatatgtgttgaatatagccatcaaattgatattggatataattcaatctgataagatattttgagatattaaagagtttttaacttgataccataaaaa

SEQ ID NO: 98 - DNA, 8130 bp, Homo sapiens
agattatagcccagcgtacgagaagcacgagtcctatagttggcgtaccctgaggcctgccagttcctgccttaatgcatatgtagtcgtaattgagttctgacacggccttggatgtttctgtcctaaatagctgacattgcatcttcaagactgtcattccagttggcttttgagtggatacgtgcagtgagatcattgacactggaaacactagttcccattttaattacttaaaacaccacgatgaaaagaaatacctgtgatttgctttctcggagcaaaagtgcctctgaggaaacactacattccagtaatgaagaggaagaccctttccgcggaatggaaccctatcttgtccggagactttcatgtcgcaatattcagcttccccctctcgccttcagacagttggaacaagctgacttgaaaagtgaatcagagaacattcaacgaccaaccagcctccccctgaagattctgccgctgattgctatcacttctgcagaatccagtggttttgatgtggacaatggcacatctgcgggacggagtcccttggatcccatgaccagcccaggatccgggctaattctccaagcaaattttgtccacagtcaacgacgggagtccttcctgtatcgatccgacagcgattatgacctctctccaaagtctatgtcccggaactcctccattgccagtgatatacacggagatgacttgattgtgactccatttgctcaggtcttggccagtctgcgaactgtacgaaacaactttgctgcattaactaatttgcaagatcgagcacctagcaaaagatcacccatgtgcaaccaaccatccatcaacaaagccaccataacagaggaggcctaccagaaactggccagcgagaccctggaggagctggactggtgtctggaccagctagagaccctacagaccaggcactccgtcagtgagatggcctccaacaagtttaaaaggatgcttaatcgggagctcacccatctctctgaaatgagtcggtctggaaatcaagtgtcagagtttatatcaaacacattcttagataagcaacatgaagtggaaattccttctccaactcagaaggaaaaggagaaaaagaaaagaccaatgtctcagatcagtggagtcaagaaattgatgcacagctctagtctgactaattcaagtatcccaaggtttggagttaaaactgaacaagaagatgtccttgccaaggaactagaagatgtgaacaaatggggtcttcatgttttcagaatagcagagttgtctggtaaccggcccttgactgttatcatgcacaccatttttcaggaacgggatttattaaaaacatttaaaattccagtagatactttaattacatatcttatgactctcgaagaccattaccatgctgatgtggcctatcacaacaatatccatgctgcagatgttgtccagtctactcatgtgctattatctacacctgctttggaggctgtgtttacagatttggagattcttgcagcaatttttgccagtgcaatacatgatgtagatcatcctggtgtgtccaatcaatttctgatcaatacaaactctgaacttgccttgatgtacaatgattcctcagtcttagagaaccatcatttggctgtgggctttaaattgcttcaggaagaaaactgtgacattttccagaatttgaccaaaaaacaaagacaatctttaaggaaaatggtcattgacatcgtacttgcaacagatatgtcaaaacacatgaatctactggctgatttgaagactatggttgaaactaagaaagtgacaagctctggagttcttcttcttgataattattccgataggattcaggttcttcagaatatggtgcactgtgcagatctgagcaacccaacaaagcctctccagctgtaccgccagtggacggaccggataatggaggagttcttccgccaaggagaccgagagagggaacgtggcatggagataagccccatgtgtgacaagcacaatgcttccgtggaaaaatcacaggtgggcttcatagactatattgttcatcccctctgggagacatgggcagacctcgtccaccctgacgcccaggatattttggacactttggaggacaatcgtgaatggtaccagagcacaatccctcagagcccctctcctgcacctgatgacccagaggagggccggcagggtcaaactgagaaattccagtttgaactaactttagaggaagatggtgagtcagacacggaaaaggacagtggcagtcaagtggaagaagacactagctgcagtgactccaagactctttgtactcaagactcagagtctactgaaattccccttgatgaacaggttgaagaggaggcagtaggggaagaagaggaaagccagcctgaagcctgtgtcatagatgatcgttctcctgacacgtaacagtgcaaaaactttcatgccttttttttttttaagtagaaaaattgtttccaaagtgcatgtcacatgccacaaccacggtcacacctcactgtcatctgccaggacgtttgttgaacaaaactgaccttgactactcagtccagcgctcaggaatatcgtaaccagttttttcacctccatgtcatccgagcaaggtggacatcttcacgaacagcgtttttaacaagatttcagcttggtagagctgacaaagcagataaaatctactccaaattattttcaagagagtgtgactcatcaggcagcccaaaagtttattggacttggggtttctattcctttttatttgtttgcaatattttcagaagaaaggcattgcacagagtgaacttaatggacgaagcaacaaatatgtcaagaacaggacatagcacgaatctgttaccagtaggaggaggatgagccacagaaattgcataattttctaatttcaagtcttcctgatacatgactgaatagtgtggttcagtgagctgcactgacctctacattttgtatgatatgtaaaacagattttttgtagagcttacttttattattaaatgtattgaggtattatatttaaaaaaaactatgttcagaacttcatctgccactggttatttttttctaaggagtaacttgcaagttttcagtacaaatctgtgctacactggataaaaatctaatttatgaattttacttgcaccttatagttcatagcaattaactgatttgtagtgattcattgtttgttttatataccaatgacttccatattttaaaagagaaaaacaactttatgttgcaggaaaccctttttgtaagtctttattatttactttgcattttgtttcactctttccagataagcagagttgctcttcaccagtgtttttcttcatgtgcaaagtgactatttgttctataatacttttatgtgtgttatatcaaatgtgtcttaagcttcatgcaaactcagtcatcagttcgtgttgtctgaagcaagtgggagatatataaatacccagtagctaaaatggtcagtcttttttagatgttttcctacttagtatctcctaataacgttttgctgtgtcactagatgttcatttcacaagtgcatgtctttctaataatccacacatttcatgctctaataatccacacatttcatgctcatttttattgtttttacagccagttatagtaagaaaaaggtttttccccttgtgctgctttataatttagcgtgtgtctgaaccttatccatgtttgctagatgaggtcttgtcaaatatatcactaccattgtcaccggtgaaaagaaacaggtagttaagttagggttaacattcatttcaaccacgaggttgtatatcatgactagcttttactcttggtttacagagaaaagttaaacagccaactaggcagtttttaagaatattaacaatatattaacaaacaccaatacaactaatcctatttggttttaatgatttcaccatgggattaagaactatatcaggaacatccctgagaaacggttttaagtgtagcaactactcttccttaatggacagccacataacgtgtaggaagtcctttatcacttatcctcgatccataagcatatcttgcagaggggaactacttctttaaacacatggagggaaagaagatgatgccactggcaccagagggttagtactgtgatgcatcctaaaatatttattatattggtaaaaattctggttaaataaaaaattagagatcactcttggctgatttcagcaccaggaactgtattacagttttagagattaattcctagtgtttacctgattatagcagttggcatcatggggcatttaattctgactttatccccacgtcagccttaataaagtcttctttaccttctctatgaagactttaaagcccaaataatcatttttcacattgatattcaagaattgagatagatagaagccaaagtgggtatctgacaagtggaaaatcaaacgtttaagaagaattacaactctgaaaagcatttatatgtggaacttctcaaggagcctcctggggactggaaagtaagtcatcagccaggcaaatgactcatgctgaagagagtccccatttcagtcccctgagatctagctgatgcttagatcctttgaaataaaaattatgtctttataactctgatcttttacataaagcagaagaggaatcaactagttaattgcaaggtttctactctgtttcctctgtaaagatcagatggtaatctttcaaataagaaaaaaataaagacgtatgtttgaccaagtagtttcacaagaatatttgggaacttgtttcttttaattttatttgtccctgagtgaagtctagaaagaaaggtaaagagtctagagtttattcctctttccaaaacattctcattcctctcctccctacacttagtatttcccccacagagtgcctagaatcttaataatgaataaaataaaaagcagcaatatgtcattaacaaatccagacctgaaagggtaaagggtttataactgcactaataaagagaggctctttttttttcttccagtttgttggtttttaatggtaccgtgttgtaaagatacccactaatggacaatcaaattgcagaaaaggctcaatatccaagagacagggactaatgcactgtacaatctgcttatccttgcccttctctcttgccaaagtgtgcttcagaaatatatactgctttaaaaaagaataaaagaatatccttttacaagtggctttacatttcctaaaatgccataagaaaatgcaatatctgggtactgtatggggaaaaaaatgtccaagtttgtgtaaaaccagtgcatttcagcttgcaagttactgaacacaataatgctgttttaattttgttttatatcagttaaaattcacaataatgtagatagaacaaattacagacaaggaaagaaaaaacttgaatgaaatggattttacagaaagctttatgataatttttgaatgcattatttattttttgtgccatgcattttttttctcaccaaatgaccttacctgtaatacagtcttgtttgtctgtttacaaccatgtatttattgcaatgtacatactgtaatgttaattgtaaattatctgttcttattaaaacatcatcccatgatgggatggtgttgatatatttggaaactcttggtgagagaatgaatggtgtgtatacatactctgtacatttttcttttctcctgtaatatagtcttgtcaccttagagcttgtttatggaagattcaagaaaactataaaatacttaaagatatataaatttaaaaaaacatagctgcaggtctttggtcccagggctgtgccttaactttaaccaatattttcttctgttttgctgcatttgaaaggtaacagtggagctagggctgggcattttacatccaggcttttaattgattagaattctgccaataggtggattttacaaaaccacagacaacctctgaaagattctgagacccttttgagacagaagctcttaagtacttcttgccagggagcagcactgcatgtgtgatggttgtttgccatctgttgatcaggaactacttcagctacttgcatttgattatttcctttttttttttttttaactcggaaacacaactggggaaatatattctttcccagtgattataaacaatctttttcttttttttaagtccttttggcttctagagctcataggaaaatggacttgatttgaaattggagccagagtttactcgtgttggttatctattcatcagcttcctgacatgttaagagaatacattaaagagaaaatactgttttttaatcctaaaatttttcttccactaagataaaccaaatgtccttacatatatgtaaacccatctatttaaacgcaaaggtgggttgatgtcagtttacatagcagaaagcattcactatcctctaagatttgtttctgcaaaactttcattgctttagaattttaaaatttcaccttgtacaatggccagcccctaaagcaggaaacatttataatggattatatggaaacatcctcccagtacttgcccagcccttgaatcatgtggcttttcagtgaaaggaaagattctttttctaggaaaaatgagcctattttattttattttattttattttttgacacaaactgtagattttagcagccctggcccaaaggaatttgattacttttgttttaaacagtacaaaggggacactataattacaaaaacatccttaactgatttgagttgtttttatttctttggatatattttcagagtggtaaattgtgtgtgagaattacaaatgattattcttttagtggtttcttagcctctcttacagcccacggggatagtactgtacatcaataccttcatatgaaatttttatatgcaatgaaaataaaagcatgggttgattctgcctatttatgactcaatcttttacaaataaaagattattcattttaaattatagttcaatcagcatgtctcttaggatactgaacgtggttgaaatgaaaggatagtgacatcataagttagtactgatattcataaccaaataaagccaacttgagtaattttgctacattaaaaattaccaaaattacttagatggcctataagattaagcatggtgttttctaagcaagctttgaaaggggccttccatacttacttaattgaatattctgggatattgaaaattattcagatacttgacaattatttttggttacctactccgcaaactacaaagttttaaggactcaacaataagttaatgagacacagtgtttgctttcatggagcttacagtctggaggggacaaaggcttaaacaatactcatataattatatatgtgatcagtacaatgaaggagctcagtggggtaaataagcaggaacctgaacttgatctgttccggagggccacagaaggcttccttgaggccttgagaaagtgatttgcatctgagttctgaaggattgtaagaggtaactagggaaaaagttgacaggaagaggaaggggatccagacaagaaacatttgcaaagatcttgaggcataaatgagcttgagacatctggagaaactgaggaaaagtgagagagtaggcagggcctggagccgcagagccattgctaaccatcctgtgtgagatatcccccattctgtagctttattctcataaccctgctcaattttctttataacacttctcacagatttatatacgtgtttgtttttgttatctgtctctcccaccagaccacagctccatgagagcaaggtctttgcttaccaatatatcactagcacttaaaactatgcctggtacacagtaggttcttaatatgtgttgaatatagccatcaaattgatattggatataattcaatctgataagatattttgagatattaaagagtttttaacttgataccataaaaaaaaaaaaaaaa

SEQ ID NO: 99 - DNA, 7814 bp, Homo sapiens
acaaaggaaatgccctcactcagctacaagtgcctcctgctccgtgcggggcctcagggccccagagccccgcaccagctctgacttctcgtggttcctggggatcttggcatcgtccttaaaaatggcttttgtttgggatcctctgggagccacggtgccaggaccatctacaagagccaaatcaagattgcgtttctcaaagtcctacagttttgatgtggacaatggcacatctgcgggacggagtcccttggatcccatgaccagcccaggatccgggctaattctccaagcaaattttgtccacagtcaacgacgggagtccttcctgtatcgatccgacagcgattatgacctctctccaaagtctatgtcccggaactcctccattgccagtgatatacacggagatgacttgattgtgactccatttgctcaggtcttggccagtctgcgaactgtacgaaacaactttgctgcattaactaatttgcaagatcgagcacctagcaaaagatcacccatgtgcaaccaaccatccatcaacaaagccaccataacagaggaggcctaccagaaactggccagcgagaccctggaggagctggactggtgtctggaccagctagagaccctacagaccaggcactccgtcagtgagatggcctccaacaagtttaaaaggatgcttaatcgggagctcacccatctctctgaaatgagtcggtctggaaatcaagtgtcagagtttatatcaaacacattcttagataagcaacatgaagtggaaattccttctccaactcagaaggaaaaggagaaaaagaaaagaccaatgtctcagatcagtggagtcaagaaattgatgcacagctctagtctgactaattcaagtatcccaaggtttggagttaaaactgaacaagaagatgtccttgccaaggaactagaagatgtgaacaaatggggtcttcatgttttcagaatagcagagttgtctggtaaccggcccttgactgttatcatgcacaccatttttcaggaacgggatttattaaaaacatttaaaattccagtagatactttaattacatatcttatgactctcgaagaccattaccatgctgatgtggcctatcacaacaatatccatgctgcagatgttgtccagtctactcatgtgctattatctacacctgctttggaggctgtgtttacagatttggagattcttgcagcaatttttgccagtgcaatacatgatgtagatcatcctggtgtgtccaatcaatttctgatcaatacaaactctgaacttgccttgatgtacaatgattcctcagtcttagagaaccatcatttggctgtgggctttaaattgcttcaggaagaaaactgtgacattttccagaatttgaccaaaaaacaaagacaatctttaaggaaaatggtcattgacatcgtacttgcaacagatatgtcaaaacacatgaatctactggctgatttgaagactatggttgaaactaagaaagtgacaagctctggagttcttcttcttgataattattccgataggattcaggttcttcagaatatggtgcactgtgcagatctgagcaacccaacaaagcctctccagctgtaccgccagtggacggaccggataatggaggagttcttccgccaaggagaccgagagagggaacgtggcatggagataagccccatgtgtgacaagcacaatgcttccgtggaaaaatcacaggtgggcttcatagactatattgttcatcccctctgggagacatgggcagacctcgtccaccctgacgcccaggatattttggacactttggaggacaatcgtgaatggtaccagagcacaatccctcagagcccctctcctgcacctgatgacccagaggagggccggcagggtcaaactgagaaattccagtttgaactaactttagaggaagatggtgagtcagacacggaaaaggacagtggcagtcaagtggaagaagacactagctgcagtgactccaagactctttgtactcaagactcagagtctactgaaattccccttgatgaacaggttgaagaggaggcagtaggggaagaagaggaaagccagcctgaagcctgtgtcatagatgatcgttctcctgacacgtaacagtgcaaaaactttcatgccttttttttttttaagtagaaaaattgtttccaaagtgcatgtcacatgccacaaccacggtcacacctcactgtcatctgccaggacgtttgttgaacaaaactgaccttgactactcagtccagcgctcaggaatatcgtaaccagttttttcacctccatgtcatccgagcaaggtggacatcttcacgaacagcgtttttaacaagatttcagcttggtagagctgacaaagcagataaaatctactccaaattattttcaagagagtgtgactcatcaggcagcccaaaagtttattggacttggggtttctattcctttttatttgtttgcaatattttcagaagaaaggcattgcacagagtgaacttaatggacgaagcaacaaatatgtcaagaacaggacatagcacgaatctgttaccagtaggaggaggatgagccacagaaattgcataattttctaatttcaagtcttcctgatacatgactgaatagtgtggttcagtgagctgcactgacctctacattttgtatgatatgtaaaacagattttttgtagagcttacttttattattaaatgtattgaggtattatatttaaaaaaaactatgttcagaacttcatctgccactggttatttttttctaaggagtaacttgcaagttttcagtacaaatctgtgctacactggataaaaatctaatttatgaattttacttgcaccttatagttcatagcaattaactgatttgtagtgattcattgtttgttttatataccaatgacttccatattttaaaagagaaaaacaactttatgttgcaggaaaccctttttgtaagtctttattatttactttgcattttgtttcactctttccagataagcagagttgctcttcaccagtgtttttcttcatgtgcaaagtgactatttgttctataatacttttatgtgtgttatatcaaatgtgtcttaagcttcatgcaaactcagtcatcagttcgtgttgtctgaagcaagtgggagatatataaatacccagtagctaaaatggtcagtcttttttagatgttttcctacttagtatctcctaataacgttttgctgtgtcactagatgttcatttcacaagtgcatgtctttctaataatccacacatttcatgctctaataatccacacatttcatgctcatttttattgtttttacagccagttatagtaagaaaaaggtttttccccttgtgctgctttataatttagcgtgtgtctgaaccttatccatgtttgctagatgaggtcttgtcaaatatatcactaccattgtcaccggtgaaaagaaacaggtagttaagttagggttaacattcatttcaaccacgaggttgtatatcatgactagcttttactcttggtttacagagaaaagttaaacagccaactaggcagtttttaagaatattaacaatatattaacaaacaccaatacaactaatcctatttggttttaatgatttcaccatgggattaagaactatatcaggaacatccctgagaaacggttttaagtgtagcaactactcttccttaatggacagccacataacgtgtaggaagtcctttatcacttatcctcgatccataagcatatcttgcagaggggaactacttctttaaacacatggagggaaagaagatgatgccactggcaccagagggttagtactgtgatgcatcctaaaatatttattatattggtaaaaattctggttaaataaaaaattagagatcactcttggctgatttcagcaccaggaactgtattacagttttagagattaattcctagtgtttacctgattatagcagttggcatcatggggcatttaattctgactttatccccacgtcagccttaataaagtcttctttaccttctctatgaagactttaaagcccaaataatcatttttcacattgatattcaagaattgagatagatagaagccaaagtgggtatctgacaagtggaaaatcaaacgtttaagaagaattacaactctgaaaagcatttatatgtggaacttctcaaggagcctcctggggactggaaagtaagtcatcagccaggcaaatgactcatgctgaagagagtccccatttcagtcccctgagatctagctgatgcttagatcctttgaaataaaaattatgtctttataactctgatcttttacataaagcagaagaggaatcaactagttaattgcaaggtttctactctgtttcctctgtaaagatcagatggtaatctttcaaataagaaaaaaataaagacgtatgtttgaccaagtagtttcacaagaatatttgggaacttgtttcttttaattttatttgtccctgagtgaagtctagaaagaaaggtaaagagtctagagtttattcctctttccaaaacattctcattcctctcctccctacacttagtatttcccccacagagtgcctagaatcttaataatgaataaaataaaaagcagcaatatgtcattaacaaatccagacctgaaagggtaaagggtttataactgcactaataaagagaggctctttttttttcttccagtttgttggtttttaatggtaccgtgttgtaaagatacccactaatggacaatcaaattgcagaaaaggctcaatatccaagagacagggactaatgcactgtacaatctgcttatccttgcccttctctcttgccaaagtgtgcttcagaaatatatactgctttaaaaaagaataaaagaatatccttttacaagtggctttacatttcctaaaatgccataagaaaatgcaatatctgggtactgtatggggaaaaaaatgtccaagtttgtgtaaaaccagtgcatttcagcttgcaagttactgaacacaataatgctgttttaattttgttttatatcagttaaaattcacaataatgtagatagaacaaattacagacaaggaaagaaaaaacttgaatgaaatggattttacagaaagctttatgataatttttgaatgcattatttattttttgtgccatgcattttttttctcaccaaatgaccttacctgtaatacagtcttgtttgtctgtttacaaccatgtatttattgcaatgtacatactgtaatgttaattgtaaattatctgttcttattaaaacatcatcccatgatgggatggtgttgatatatttggaaactcttggtgagagaatgaatggtgtgtatacatactctgtacatttttcttttctcctgtaatatagtcttgtcaccttagagcttgtttatggaagattcaagaaaactataaaatacttaaagatatataaatttaaaaaaacatagctgcaggtctttggtcccagggctgtgccttaactttaaccaatattttcttctgttttgctgcatttgaaaggtaacagtggagctagggctgggcattttacatccaggcttttaattgattagaattctgccaataggtggattttacaaaaccacagacaacctctgaaagattctgagacccttttgagacagaagctcttaagtacttcttgccagggagcagcactgcatgtgtgatggttgtttgccatctgttgatcaggaactacttcagctacttgcatttgattatttcctttttttttttttttaactcggaaacacaactggggaaatatattctttcccagtgattataaacaatctttttcttttttttaagtccttttggcttctagagctcataggaaaatggacttgatttgaaattggagccagagtttactcgtgttggttatctattcatcagcttcctgacatgttaagagaatacattaaagagaaaatactgttttttaatcctaaaatttttcttccactaagataaaccaaatgtccttacatatatgtaaacccatctatttaaacgcaaaggtgggttgatgtcagtttacatagcagaaagcattcactatcctctaagatttgtttctgcaaaactttcattgctttagaattttaaaatttcaccttgtacaatggccagcccctaaagcaggaaacatttataatggattatatggaaacatcctcccagtacttgcccagcccttgaatcatgtggcttttcagtgaaaggaaagattctttttctaggaaaaatgagcctattttattttattttattttattttttgacacaaactgtagattttagcagccctggcccaaaggaatttgattacttttgttttaaacagtacaaaggggacactataattacaaaaacatccttaactgatttgagttgtttttatttctttggatatattttcagagtggtaaattgtgtgtgagaattacaaatgattattcttttagtggtttcttagcctctcttacagcccacggggatagtactgtacatcaataccttcatatgaaatttttatatgcaatgaaaataaaagcatgggttgattctgcctatttatgactcaatcttttacaaataaaagattattcattttaaattatagttcaatcagcatgtctcttaggatactgaacgtggttgaaatgaaaggatagtgacatcataagttagtactgatattcataaccaaataaagccaacttgagtaattttgctacattaaaaattaccaaaattacttagatggcctataagattaagcatggtgttttctaagcaagctttgaaaggggccttccatacttacttaattgaatattctgggatattgaaaattattcagatacttgacaattatttttggttacctactccgcaaactacaaagttttaaggactcaacaataagttaatgagacacagtgtttgctttcatggagcttacagtctggaggggacaaaggcttaaacaatactcatataattatatatgtgatcagtacaatgaaggagctcagtggggtaaataagcaggaacctgaacttgatctgttccggagggccacagaaggcttccttgaggccttgagaaagtgatttgcatctgagttctgaaggattgtaagaggtaactagggaaaaagttgacaggaagaggaaggggatccagacaagaaacatttgcaaagatcttgaggcataaatgagcttgagacatctggagaaactgaggaaaagtgagagagtaggcagggcctggagccgcagagccattgctaaccatcctgtgtgagatatcccccattctgtagctttattctcataaccctgctcaattttctttataacacttctcacagatttatatacgtgtttgtttttgttatctgtctctcccaccagaccacagctccatgagagcaaggtctttgcttaccaatatatcactagcacttaaaactatgcctggtacacagtaggttcttaatatgtgttgaatatagccatcaaattgatattggatataattcaatctgataagatattttgagatattaaagagtttttaacttgataccataaaaa

SEQ ID NO: 100 - protein, 809 aa, Homo sapiens
MEAEGSSAPARAGSGEGSDSAGGATLKAPKHLWRHEQHHQYPLRQPQFRLLHPHHHLPPPPPPSPQPQPQCPLQPPPPPPLPPPPPPPGAARGRYASSGATGRVRHRGYSDTERYLYCRAMDRTSYAVETGHRPGLKKSRMSWPSSFQGLRRFDVDNGTSAGRSPLDPMTSPGSGLILQANFVHSQRRESFLYRSDSDYDLSPKSMSRNSSIASDIHGDDLIVTPFAQVLASLRTVRNNFAALTNLQDRAPSKRSPMCNQPSINKATITEEAYQKLASETLEELDWCLDQLETLQTRHSVSEMASNKFKRMLNRELTHLSEMSRSGNQVSEFISNTFLDKQHEVEIPSPTQKEKEKKKRPMSQISGVKKLMHSSSLTNSSIPRFGVKTEQEDVLAKELEDVNKWGLHVFRIAELSGNRPLTVIMHTIFQERDLLKTFKIPVDTLITYLMTLEDHYHADVAYHNNIHAADVVQSTHVLLSTPALEAVFTDLEILAAIFASAIHDVDHPGVSNQFLINTNSELALMYNDSSVLENHHLAVGFKLLQEENCDIFQNLTKKQRQSLRKMVIDIVLATDMSKHMNLLADLKTMVETKKVTSSGVLLLDNYSDRIQVLQNMVHCADLSNPTKPLQLYRQWTDRIMEEFFRQGDRERERGMEISPMCDKHNASVEKSQVGFIDYIVHPLWETWADLVHPDAQDILDTLEDNREWYQSTIPQSPSPAPDDPEEGRQGQTEKFQFELTLEEDGESDTEKDSGSQVEEDTSCSDSKTLCTQDSESTEIPLDEQVEEEAVGEEEESQPEACVIDDRSPDT

SEQ ID NO: 101 - protein, 699 aa, Homo sapiens
MSLPSSCEYLTLGKVARFRSAYVHGSPYAINMPIDIKPQRRRFDVDNGTSAGRSPLDPMTSPGSGLILQANFVHSQRRESFLYRSDSDYDLSPKSMSRNSSIASDIHGDDLIVTPFAQVLASLRTVRNNFAALTNLQDRAPSKRSPMCNQPSINKATITEEAYQKLASETLEELDWCLDQLETLQTRHSVSEMASNKFKRMLNRELTHLSEMSRSGNQVSEFISNTFLDKQHEVEIPSPTQKEKEKKKRPMSQISGVKKLMHSSSLTNSSIPRFGVKTEQEDVLAKELEDVNKWGLHVFRIAELSGNRPLTVIMHTIFQERDLLKTFKIPVDTLITYLMTLEDHYHADVAYHNNIHAADVVQSTHVLLSTPALEAVFTDLEILAAIFASAIHDVDHPGVSNQFLINTNSELALMYNDSSVLENHHLAVGFKLLQEENCDIFQNLTKKQRQSLRKMVIDIVLATDMSKHMNLLADLKTMVETKKVTSSGVLLLDNYSDRIQVLQNMVHCADLSNPTKPLQLYRQWTDRIMEEFFRQGDRERERGMEISPMCDKHNASVEKSQVGFIDYIVHPLWETWADLVHPDAQDILDTLEDNREWYQSTIPQSPSPAPDDPEEGRQGQTEKFQFELTLEEDGESDTEKDSGSQVEEDTSCSDSKTLCTQDSESTEIPLDEQVEEEAVGEEEESQPEACVIDDRSPDT

SEQ ID NO: 102 - protein, 745 aa, Homo sapiens
MAQQTSPDTLTVPEVDNPHCPNPWLNEDLVKSLRENLLQHEKSKTARKSVSPKLSPVISPRNSPRLLRRMLLSSNIPKQRRFTVAHTCFDVDNGTSAGRSPLDPMTSPGSGLILQANFVHSQRRESFLYRSDSDYDLSPKSMSRNSSIASDIHGDDLIVTPFAQVLASLRTVRNNFAALTNLQDRAPSKRSPMCNQPSINKATITEEAYQKLASETLEELDWCLDQLETLQTRHSVSEMASNKFKRMLNRELTHLSEMSRSGNQVSEFISNTFLDKQHEVEIPSPTQKEKEKKKRPMSQISGVKKLMHSSSLTNSSIPRFGVKTEQEDVLAKELEDVNKWGLHVFRIAELSGNRPLTVIMHTIFQERDLLKTFKIPVDTLITYLMTLEDHYHADVAYHNNIHAADVVQSTHVLLSTPALEAVFTDLEILAAIFASAIHDVDHPGVSNQFLINTNSELALMYNDSSVLENHHLAVGFKLLQEENCDIFQNLTKKQRQSLRKMVIDIVLATDMSKHMNLLADLKTMVETKKVTSSGVLLLDNYSDRIQVLQNMVHCADLSNPTKPLQLYRQWTDRIMEEFFRQGDRERERGMEISPMCDKHNASVEKSQVGFIDYIVHPLWETWADLVHPDAQDILDTLEDNREWYQSTIPQSPSPAPDDPEEGRQGQTEKFQFELTLEEDGESDTEKDSGSQVEEDTSCSDSKTLCTQDSESTEIPLDEQVEEEAVGEEEESQPEACVIDDRSPDT

SEQ ID NO: 103 - protein, 673 aa, Homo sapiens
MMHVNNFPFRRHSWICFDVDNGTSAGRSPLDPMTSPGSGLILQANFVHSQRRESFLYRSDSDYDLSPKSMSRNSSIASDIHGDDLIVTPFAQVLASLRTVRNNFAALTNLQDRAPSKRSPMCNQPSINKATITEEAYQKLASETLEELDWCLDQLETLQTRHSVSEMASNKFKRMLNRELTHLSEMSRSGNQVSEFISNTFLDKQHEVEIPSPTQKEKEKKKRPMSQISGVKKLMHSSSLTNSSIPRFGVKTEQEDVLAKELEDVNKWGLHVFRIAELSGNRPLTVIMHTIFQERDLLKTFKIPVDTLITYLMTLEDHYHADVAYHNNIHAADVVQSTHVLLSTPALEAVFTDLEILAAIFASAIHDVDHPGVSNQFLINTNSELALMYNDSSVLENHHLAVGFKLLQEENCDIFQNLTKKQRQSLRKMVIDIVLATDMSKHMNLLADLKTMVETKKVTSSGVLLLDNYSDRIQVLQNMVHCADLSNPTKPLQLYRQWTDRIMEEFFRQGDRERERGMEISPMCDKHNASVEKSQVGFIDYIVHPLWETWADLVHPDAQDILDTLEDNREWYQSTIPQSPSPAPDDPEEGRQGQTEKFQFELTLEEDGESDTEKDSGSQVEEDTSCSDSKTLCTQDSESTEIPLDEQVEEEAVGEEEESQPEACVIDDRSPDT

SEQ ID NO: 104 - protein, 507 aa, Homo sapiens
MASNKFKRMLNRELTHLSEMSRSGNQVSEFISNTFLDKQHEVEIPSPTQKEKEKKKRPMSQISGVKKLMHSSSLTNSSIPRFGVKTEQEDVLAKELEDVNKWGLHVFRIAELSGNRPLTVIMHTIFQERDLLKTFKIPVDTLITYLMTLEDHYHADVAYHNNIHAADVVQSTHVLLSTPALEAVFTDLEILAAIFASAIHDVDHPGVSNQFLINTNSELALMYNDSSVLENHHLAVGFKLLQEENCDIFQNLTKKQRQSLRKMVIDIVLATDMSKHMNLLADLKTMVETKKVTSSGVLLLDNYSDRIQVLQNMVHCADLSNPTKPLQLYRQWTDRIMEEFFRQGDRERERGMEISPMCDKHNASVEKSQVGFIDYIVHPLWETWADLVHPDAQDILDTLEDNREWYQSTIPQSPSPAPDDPEEGRQGQTEKFQFELTLEEDGESDTEKDSGSQVEEDTSCSDSKTLCTQDSESTEIPLDEQVEEEAVGEEEESQPEACVIDDRSPDT

SEQ ID NO: 105 - protein, 679 aa, Homo sapiens
MSIIMKPRSRSTSSLRTAEAVCFDVDNGTSAGRSPLDPMTSPGSGLILQANFVHSQRRESFLYRSDSDYDLSPKSMSRNSSIASDIHGDDLIVTPFAQVLASLRTVRNNFAALTNLQDRAPSKRSPMCNQPSINKATITEEAYQKLASETLEELDWCLDQLETLQTRHSVSEMASNKFKRMLNRELTHLSEMSRSGNQVSEFISNTFLDKQHEVEIPSPTQKEKEKKKRPMSQISGVKKLMHSSSLTNSSIPRFGVKTEQEDVLAKELEDVNKWGLHVFRIAELSGNRPLTVIMHTIFQERDLLKTFKIPVDTLITYLMTLEDHYHADVAYHNNIHAADVVQSTHVLLSTPALEAVFTDLEILAAIFASAIHDVDHPGVSNQFLINTNSELALMYNDSSVLENHHLAVGFKLLQEENCDIFQNLTKKQRQSLRKMVIDIVLATDMSKHMNLLADLKTMVETKKVTSSGVLLLDNYSDRIQVLQNMVHCADLSNPTKPLQLYRQWTDRIMEEFFRQGDRERERGMEISPMCDKHNASVEKSQVGFIDYIVHPLWETWADLVHPDAQDILDTLEDNREWYQSTIPQSPSPAPDDPEEGRQGQTEKFQFELTLEEDGESDTEKDSGSQVEEDTSCSDSKTLCTQDSESTEIPLDEQVEEEAVGEEEESQPEACVIDDRSPDT

SEQ ID NO: 106 - protein, 518 aa, Homo sapiens
MPEANYLLSVSWGYIKFKRMLNRELTHLSEMSRSGNQVSEFISNTFLDKQHEVEIPSPTQKEKEKKKRPMSQISGVKKLMHSSSLTNSSIPRFGVKTEQEDVLAKELEDVNKWGLHVFRIAELSGNRPLTVIMHTIFQERDLLKTFKIPVDTLITYLMTLEDHYHADVAYHNNIHAADVVQSTHVLLSTPALEAVFTDLEILAAIFASAIHDVDHPGVSNQFLINTNSELALMYNDSSVLENHHLAVGFKLLQEENCDIFQNLTKKQRQSLRKMVIDIVLATDMSKHMNLLADLKTMVETKKVTSSGVLLLDNYSDRIQVLQNMVHCADLSNPTKPLQLYRQWTDRIMEEFFRQGDRERERGMEISPMCDKHNASVEKSQVGFIDYIVHPLWETWADLVHPDAQDILDTLEDNREWYQSTIPQSPSPAPDDPEEGRQGQTEKFQFELTLEEDGESDTEKDSGSQVEEDTSCSDSKTLCTQDSESTEIPLDEQVEEEAVGEEEESQPEACVIDDRSPDT

SEQ ID NO: 107 - protein, 748 aa, Homo sapiens
MKRNTCDLLSRSKSASEETLHSSNEEEDPFRGMEPYLVRRLSCRNIQLPPLAFRQLEQADLKSESENIQRPTSLPLKILPLIAITSAESSGFDVDNGTSAGRSPLDPMTSPGSGLILQANFVHSQRRESFLYRSDSDYDLSPKSMSRNSSIASDIHGDDLIVTPFAQVLASLRTVRNNFAALTNLQDRAPSKRSPMCNQPSINKATITEEAYQKLASETLEELDWCLDQLETLQTRHSVSEMASNKFKRMLNRELTHLSEMSRSGNQVSEFISNTFLDKQHEVEIPSPTQKEKEKKKRPMSQISGVKKLMHSSSLTNSSIPRFGVKTEQEDVLAKELEDVNKWGLHVFRIAELSGNRPLTVIMHTIFQERDLLKTFKIPVDTLITYLMTLEDHYHADVAYHNNIHAADVVQSTHVLLSTPALEAVFTDLEILAAIFASAIHDVDHPGVSNQFLINTNSELALMYNDSSVLENHHLAVGFKLLQEENCDIFQNLTKKQRQSLRKMVIDIVLATDMSKHMNLLADLKTMVETKKVTSSGVLLLDNYSDRIQVLQNMVHCADLSNPTKPLQLYRQWTDRIMEEFFRQGDRERERGMEISPMCDKHNASVEKSQVGFIDYIVHPLWETWADLVHPDAQDILDTLEDNREWYQSTIPQSPSPAPDDPEEGRQGQTEKFQFELTLEEDGESDTEKDSGSQVEEDTSCSDSKTLCTQDSESTEIPLDEQVEEEAVGEEEESQPEACVIDDRSPDT

SEQ ID NO: 108 - protein, 687 aa, Homo sapiens
MAFVWDPLGATVPGPSTRAKSRLRFSKSYSFDVDNGTSAGRSPLDPMTSPGSGLILQANFVHSQRRESFLYRSDSDYDLSPKSMSRNSSIASDIHGDDLIVTPFAQVLASLRTVRNNFAALTNLQDRAPSKRSPMCNQPSINKATITEEAYQKLASETLEELDWCLDQLETLQTRHSVSEMASNKFKRMLNRELTHLSEMSRSGNQVSEFISNTFLDKQHEVEIPSPTQKEKEKKKRPMSQISGVKKLMHSSSLTNSSIPRFGVKTEQEDVLAKELEDVNKWGLHVFRIAELSGNRPLTVIMHTIFQERDLLKTFKIPVDTLITYLMTLEDHYHADVAYHNNIHAADVVQSTHVLLSTPALEAVFTDLEILAAIFASAIHDVDHPGVSNQFLINTNSELALMYNDSSVLENHHLAVGFKLLQEENCDIFQNLTKKQRQSLRKMVIDIVLATDMSKHMNLLADLKTMVETKKVTSSGVLLLDNYSDRIQVLQNMVHCADLSNPTKPLQLYRQWTDRIMEEFFRQGDRERERGMEISPMCDKHNASVEKSQVGFIDYIVHPLWETWADLVHPDAQDILDTLEDNREWYQSTIPQSPSPAPDDPEEGRQGQTEKFQFELTLEEDGESDTEKDSGSQVEEDTSCSDSKTLCTQDSESTEIPLDEQVEEEAVGEEEESQPEACVIDDRSPDT

SEQ ID NO: 109 - DNA, 2695 bp, Homo sapiens
acagacagcggcagagatcttgggctgaggttcccgggcgggcgggcgcggagagacgcgggaagcaggggctgggcgggggtcgcggcgccgcagctagcgcagccagcccgagggccgccgccgccgccgcccagcgcgctccggggccgccggccgcagccagcacccgccgcgccgcagctccgggaccggccccggccgccgccgccgcgatgggcaacgccgccgccgccaagaagggcagcgagcaggagagcgtgaaagaattcttagccaaagccaaagaagattttcttaaaaaatgggaaagtcccgctcagaacacagcccacttggatcagtttgaacgaatcaagaccctcggcacgggctccttcgggcgggtgatgctggtgaaacacaaggagaccgggaaccactatgccatgaagatcctcgacaaacagaaggtggtgaaactgaaacagatcgaacacaccctgaatgaaaagcgcatcctgcaagctgtcaactttccgttcctcgtcaaactcgagttctccttcaaggacaactcaaacttatacatggtcatggagtacgtgcccggcggggagatgttctcacacctacggcggatcggaaggttcagtgagccccatgcccgtttctacgcggcccagatcgtcctgacctttgagtatctgcactcgctggatctcatctacagggacctgaagccggagaatctgctcattgaccagcagggctacattcaggtgacagacttcggtttcgccaagcgcgtgaagggccgcacttggaccttgtgcggcacccctgagtacctggcccctgagattatcctgagcaaaggctacaacaaggccgtggactggtgggccctgggggttcttatctatgaaatggccgctggctacccgcccttcttcgcagaccagcccatccagatctatgagaagatcgtctctgggaaggtgcgcttcccttcccacttcagctctgacttgaaggacctgctgcggaacctcctgcaggtagatctcaccaagcgctttgggaacctcaagaatggggtcaacgatatcaagaaccacaagtggtttgccacaactgactggattgccatctaccagaggaaggtggaagctcccttcataccaaagtttaaaggccctggggatacgagtaactttgacgactatgaggaagaagaaatccgggtctccatcaatgagaagtgtggcaaggagttttctgagttttaggggcatgcctgtgcccccatgggttttcttttttcttttttcttttttttggtcgggggggtgggagggttggattgaacagccagagggccccagagttccttgcatctaatttcacccccaccccaccctccagggttagggggagcaggaagcccagataatcagagggacagaaacaccagctgctccccctcatccccttcaccctcctgccccctctcccacttttcccttcctctttccccacagccccccagcccctcagccctcccagcccacttctgcctgttttaaacgagtttctcaactccagtcagaccaggtcttgctggtgtatccagggacagggtatggaaagaggggctcacgcttaactccagcccccacccacacccccatcccacccaaccacaggccccacttgctaagggcaaatgaacgaagcgccaaccttcctttcggagtaatcctgcctgggaaggagagatttttagtgacatgttcagtgggttgcttgctagaatttttttaaaaaaacaacaatttaaaatcttatttaagttccaccagtgcctccctccctccttcctctactcccacccctcccatgtccccccattcctcaaatccattttaaagagaagcagactgactttggaaagggaggcgctggggtttgaacctccccgctgctaatctcccctgggcccctccccggggaatcctctctgccaatcctgcgagggtctaggcccctttaggaagcctccgctctctttttccccaacagacctgtcttcacccttgggctttgaaagccagacaaagcagctgcccctctccctgccaaagaggagtcatcccccaaaaagacagagggggagccccaagcccaagtctttcctcccagcagcgtttccccccaactccttaattttattctccgctagattttaacgtccagccttccctcagctgagtggggagggcatccctgcaaaagggaacagaagaggccaagtccccccaagccacggcccggggttcaaggctagagctgctggggaggggctgcctgttttactcacccaccagcttccgcctcccccatcctgggcgcccctcctccagcttagctgtcagctgtccatcacctctcccccactttctcatttgtgcttttttctctcgtaatagaaaagtggggagccgctggggagccaccccattcatccccgtatttccccctctcataacttctccccatcccaggaggagttctcaggcctggggtggggccccgggtgggtgcgggggcgattcaacctgtgtgctgcgaaggacgagacttcctcttgaacagtgtgctgttgtaaacatatttgaaaactattaccaataaagttttgtttaaaaaaaaa

SEQ ID NO: 110 - DNA, 2492 bp, Homo sapiens
accgtagtgccggtgccctgagaacaggactgagtgatggcttccaactccagcgatgtgaaagaattcttagccaaagccaaagaagattttcttaaaaaatgggaaagtcccgctcagaacacagcccacttggatcagtttgaacgaatcaagaccctcggcacgggctccttcgggcgggtgatgctggtgaaacacaaggagaccgggaaccactatgccatgaagatcctcgacaaacagaaggtggtgaaactgaaacagatcgaacacaccctgaatgaaaagcgcatcctgcaagctgtcaactttccgttcctcgtcaaactcgagttctccttcaaggacaactcaaacttatacatggtcatggagtacgtgcccggcggggagatgttctcacacctacggcggatcggaaggttcagtgagccccatgcccgtttctacgcggcccagatcgtcctgacctttgagtatctgcactcgctggatctcatctacagggacctgaagccggagaatctgctcattgaccagcagggctacattcaggtgacagacttcggtttcgccaagcgcgtgaagggccgcacttggaccttgtgcggcacccctgagtacctggcccctgagattatcctgagcaaaggctacaacaaggccgtggactggtgggccctgggggttcttatctatgaaatggccgctggctacccgcccttcttcgcagaccagcccatccagatctatgagaagatcgtctctgggaaggtgcgcttcccttcccacttcagctctgacttgaaggacctgctgcggaacctcctgcaggtagatctcaccaagcgctttgggaacctcaagaatggggtcaacgatatcaagaaccacaagtggtttgccacaactgactggattgccatctaccagaggaaggtggaagctcccttcataccaaagtttaaaggccctggggatacgagtaactttgacgactatgaggaagaagaaatccgggtctccatcaatgagaagtgtggcaaggagttttctgagttttaggggcatgcctgtgcccccatgggttttcttttttcttttttcttttttttggtcgggggggtgggagggttggattgaacagccagagggccccagagttccttgcatctaatttcacccccaccccaccctccagggttagggggagcaggaagcccagataatcagagggacagaaacaccagctgctccccctcatccccttcaccctcctgccccctctcccacttttcccttcctctttccccacagccccccagcccctcagccctcccagcccacttctgcctgttttaaacgagtttctcaactccagtcagaccaggtcttgctggtgtatccagggacagggtatggaaagaggggctcacgcttaactccagcccccacccacacccccatcccacccaaccacaggccccacttgctaagggcaaatgaacgaagcgccaaccttcctttcggagtaatcctgcctgggaaggagagatttttagtgacatgttcagtgggttgcttgctagaatttttttaaaaaaacaacaatttaaaatcttatttaagttccaccagtgcctccctccctccttcctctactcccacccctcccatgtccccccattcctcaaatccattttaaagagaagcagactgactttggaaagggaggcgctggggtttgaacctccccgctgctaatctcccctgggcccctccccggggaatcctctctgccaatcctgcgagggtctaggcccctttaggaagcctccgctctctttttccccaacagacctgtcttcacccttgggctttgaaagccagacaaagcagctgcccctctccctgccaaagaggagtcatcccccaaaaagacagagggggagccccaagcccaagtctttcctcccagcagcgtttccccccaactccttaattttattctccgctagattttaacgtccagccttccctcagctgagtggggagggcatccctgcaaaagggaacagaagaggccaagtccccccaagccacggcccggggttcaaggctagagctgctggggaggggctgcctgttttactcacccaccagcttccgcctcccccatcctgggcgcccctcctccagcttagctgtcagctgtccatcacctctcccccactttctcatttgtgcttttttctctcgtaatagaaaagtggggagccgctggggagccaccccattcatccccgtatttccccctctcataacttctccccatcccaggaggagttctcaggcctggggtggggccccgggtgggtgcgggggcgattcaacctgtgtgctgcgaaggacgagacttcctcttgaacagtgtgctgttgtaaacatatttgaaaactattaccaataaagttttgtttaaaaaaaaa

SEQ ID NO: 111 - protein, 351 aa, Homo sapiens
MGNAAAAKKGSEQESVKEFLAKAKEDFLKKWESPAQNTAHLDQFERIKTLGTGSFGRVMLVKHKETGNHYAMKILDKQKVVKLKQIEHTLNEKRILQAVNFPFLVKLEFSFKDNSNLYMVMEYVPGGEMFSHLRRIGRFSEPHARFYAAQIVLTFEYLHSLDLIYRDLKPENLLIDQQGYIQVTDFGFAKRVKGRTWTLCGTPEYLAPEIILSKGYNKAVDWWALGVLIYEMAAGYPPFFADQPIQIYEKIVSGKVRFPSHFSSDLKDLLRNLLQVDLTKRFGNLKNGVNDIKNHKWFATTDWIAIYQRKVEAPFIPKFKGPGDTSNFDDYEEEEIRVSINEKCGKEFSEF

SEQ ID NO: 112 - protein, 343 aa, Homo sapiens
MASNSSDVKEFLAKAKEDFLKKWESPAQNTAHLDQFERIKTLGTGSFGRVMLVKHKETGNHYAMKILDKQKVVKLKQIEHTLNEKRILQAVNFPFLVKLEFSFKDNSNLYMVMEYVPGGEMFSHLRRIGRFSEPHARFYAAQIVLTFEYLHSLDLIYRDLKPENLLIDQQGYIQVTDFGFAKRVKGRTWTLCGTPEYLAPEIILSKGYNKAVDWWALGVLIYEMAAGYPPFFADQPIQIYEKIVSGKVRFPSHFSSDLKDLLRNLLQVDLTKRFGNLKNGVNDIKNHKWFATTDWIAIYQRKVEAPFIPKFKGPGDTSNFDDYEEEEIRVSINEKCGKEFSEF

SEQ ID NO: 113 - DNA, 4616 bp, Homo sapiens
tgcgaagatacagtcgggccagggcctggcctgggcgcgcggctgcccgggggcgcgcagagagggcggaccgcgcgaagggggagtgtctgcccgccgccgccactgctgctgccaccgccgtcgccgccgccgccgccgccgccgctgctgctgccggtgctaaggagttcgctggagccctttcctcagacccggcccggtcttcgcgcccggactcctggcgccagcgctaggcgcactcaccgctctgacgggtgcagacgcgggagttgtcccagactgtggagtggcgggcacggccccagccccccttcccttccctgaccccttcttgccatcgccccagacatggggaacgcggcgaccgccaagaaaggcagcgaggtggagagcgtgaaagagtttctagccaaagccaaagaagactttttgaaaaaatgggagaatccaactcagaataatgccggacttgaagattttgaaaggaaaaaaacccttggaacaggttcatttggaagagtcatgttggtaaaacacaaagccactgaacagtattatgccatgaagatcttagataagcagaaggttgttaaactgaagcaaatagagcatactttgaatgagaaaagaatattacaggcagtgaattttcctttccttgttcgactggagtatgcttttaaggataattctaatttatacatggttatggaatatgtccctgggggtgaaatgttttcacatctaagaagaattggaaggttcagtgagccccatgcacggttctatgcagctcagatagtgctaacattcgagtacctccattcactagacctcatctacagagatctaaaacctgaaaatctcttaattgaccatcaaggctatatccaggtcacagactttgggtttgccaaaagagttaaaggcagaacttggacattatgtggaactccagagtatttggctccagaaataattctcagcaagggctacaataaggcagtggattggtgggcattaggagtgctaatctatgaaatggcagctggctatcccccattctttgcagaccaaccaattcagatttatgaaaagattgtttctggaaaggtccgattcccatcccacttcagttcagatctcaaggaccttctacggaacctgctgcaggtggatttgaccaagagatttggaaatctaaagaatggtgtcagtgatataaaaactcacaagtggtttgccacgacagattggattgctatttaccagaggaaggttgaagctccattcataccaaagtttagaggctctggagataccagcaactttgatgactatgaagaagaagatatccgtgtctctataacagaaaaatgtgcaaaagaatttggtgaattttaaagaggaacaagatgacatctgagctcacactcagtgtttgcactctgttgagagataaggtagagctgagaccgtccttgttgaagcagttacctagttccttcattccaacgactgagtgaggtctttattgccatcatcccgtgtgcgcactctgcatccacctatgtaacaaggcaccgctaagcaagcattgtctgtgccataacacagtactagaccactttcttacttctctttgggttgtctttctcctctcctatatccatttcttccttttccaatttcattggttttctctaaacagtgctccattttattttgttggtgtttcagatgggcagtgttatggctacgtgatatttgaagggaaggataagtgttgctttcagtagttattgccaatattgttgttggtcaatggcttgaagataaactttctaataattattatttctttgagtagctcagacttggttttgccaaaactcttggtaatttttgaagatagactgtcttatcaccaaggaaatttatacaaattaagactaactttcttggaattcactattctggcaataaattttggtagactaatacagtacagctagacccagaaatttggaaggctgtagatcagaggttctagttccctttccctccttttatatcctcctctccttgagtaatgaagtgaccagcctgtgtagtgtgacaaacgtgtctcattcagcaggaaaaactaatgatatggatcatcacccagattctctcacttggtaccagcatttctgtaggtattagagaagagttctaagttttctaaaccttaactgttccttaaggattttagccagtattttaatagaacatgattaatgaaagtgacaaattttaaattttctctaatagtcctcatcataaactttttaaaggaaaataagcaaactaaaaagaacattggtttagataaatacttatactttgcaaagtcaaaaatggcttgatttttggaaacaatatagaggtattcatatttaaatgagggtttacatttgttttgttttgtaaccgttaaaaagaagttgtttccagctaattattgtggtgtactatatttgtgagcctagggtaggggcactgctgcaacttctgctttcatcccatgcctcatcaatgaggaaagggaacaaagtgtataaaactgccacaattgtattttaattttgaggtatgatattttcagatatttcataatttctaacctctgttctctcagtaaacagaatgtctgatcgatcatgcagatacaatgttggtatttgagaggttagtttttttcctacacttttttttgccaactgacttaacaacattgctgtcaggtggaaatttcaagcacttttgcacatttagttcagtgtttgttgagaatccatggcttaacccacttgttttgctatttttttctttgcttttaattttccccatctgattttatctctgcgtttcagtgacctaccttaaaacaacacacgagaagagttaaactgggttcattttaatgatcaatttacctgcatataaaatttatttttaatcaagctgatcttaatgtatataatcattctatttgctttattatcggtgcaggtaggtcattaacaccacttcttttcatctgtaccacaccctggtgaaacctttgaagacataaaaaaaacctgtctgagatgttctttctaccaatctatatgtctttcggttatcaagtgtttctgcatggtaatgtcatgtaaatgctgatattgatttcactggtccatctatatttaaaacgtgcaagaaaaaaataaaatactctgctctagcaagttttgtgtaacaaaggcatatcgtcatgttaataaatttaaaacatcattcgtataaaatattttaattttcttgtatttcatttagacccaagaacatgctgaccaatgtgttctatatgtaaactacaaattctatggtagctttgttgtatattattgtaaaattattttaataagtcatggggatgacaatttgattattacaatttagttttcagtaatcaaaaagatttctatgaattctaaaaaatatttttttctatgaaattactagtgcccagctgtagaatctaccttaggtagatgatccctagacatacgttggttttgagggctattcagccattccattttactctctatttaaaggccgtgagcaagcttgtcatgagcaaatatgtcaagggagtcaatttctgaccaatcaagtacactaaattagaatatttttaaagtatgtaacattcccagtttcagccacaatttagccaagaataagataaaaacttgaataagaagtaagtagcataaatcagtatttaacctaaaattacatatttgaaacagaagatattatgttatgctcagtaaataattaagagatggcattgtgtaagaaggagccctagactgaaagtcaagacatctgaatttcaggctggaaaactatcagtatgatctcagcctcagttctcttgtctgtaaaatggaagaactggattaggcagtttgtaagattcctcctaactttcacagtcgatgacaagattgtctttttatctgatattttgaagggtatattgctttgaagtaagtctcaataaggcaatatattttagggcatctttcttcttatctctgacagtgttcttaaaattatttgaatatcataagagccttggtgtctgtcctaattcctttctcactcaccgatgctgaatacccagttgaatcaaactgtcaacctaccaaaaacgatattgtggcttatgggtattgctgtctcattcttggtatattcttgtgttaactgcccattggcctgaaaatactcattgtaagcctgaaaaaaaaaatctttcccactgttttttctgcttgttgtaagaatcaaatgaaataatgtatgtgaaagcaccttgtaaactgtaacctatcaatgtaaaatgttaaggtgtgttgttatttcattaattacttctttgtttagaatggaatttcctatgcactactgtagctaggaaatgctgaaaacaactgtgttttttaattaatcaataactgcaaaattaaagtaccttcaatggataagacaaaaaaaaaaaaaaaaaa

SEQ ID NO: 114 - DNA, 4481 bp, Homo sapiens
acatgcatagctcttagcttctgtgtaagaagttgtgagctccttctggaaacatttgcagttacattaagtaaagtgtaaatgcacatgaatggcagcttatagagaaccaccttgtaaccagtatacaggtacaactacagctcttcagaaattggaaggttttgctagccggttatttcatagacactctaaaggtactgcacatgatcagaaaacagctctggaaaatgacagccttcatttctctgaacatactgccttatgggacagatcaatgaaagagtttctagccaaagccaaagaagactttttgaaaaaatgggagaatccaactcagaataatgccggacttgaagattttgaaaggaaaaaaacccttggaacaggttcatttggaagagtcatgttggtaaaacacaaagccactgaacagtattatgccatgaagatcttagataagcagaaggttgttaaactgaagcaaatagagcatactttgaatgagaaaagaatattacaggcagtgaattttcctttccttgttcgactggagtatgcttttaaggataattctaatttatacatggttatggaatatgtccctgggggtgaaatgttttcacatctaagaagaattggaaggttcagtgagccccatgcacggttctatgcagctcagatagtgctaacattcgagtacctccattcactagacctcatctacagagatctaaaacctgaaaatctcttaattgaccatcaaggctatatccaggtcacagactttgggtttgccaaaagagttaaaggcagaacttggacattatgtggaactccagagtatttggctccagaaataattctcagcaagggctacaataaggcagtggattggtgggcattaggagtgctaatctatgaaatggcagctggctatcccccattctttgcagaccaaccaattcagatttatgaaaagattgtttctggaaaggtccgattcccatcccacttcagttcagatctcaaggaccttctacggaacctgctgcaggtggatttgaccaagagatttggaaatctaaagaatggtgtcagtgatataaaaactcacaagtggtttgccacgacagattggattgctatttaccagaggaaggttgaagctccattcataccaaagtttagaggctctggagataccagcaactttgatgactatgaagaagaagatatccgtgtctctataacagaaaaatgtgcaaaagaatttggtgaattttaaagaggaacaagatgacatctgagctcacactcagtgtttgcactctgttgagagataaggtagagctgagaccgtccttgttgaagcagttacctagttccttcattccaacgactgagtgaggtctttattgccatcatcccgtgtgcgcactctgcatccacctatgtaacaaggcaccgctaagcaagcattgtctgtgccataacacagtactagaccactttcttacttctctttgggttgtctttctcctctcctatatccatttcttccttttccaatttcattggttttctctaaacagtgctccattttattttgttggtgtttcagatgggcagtgttatggctacgtgatatttgaagggaaggataagtgttgctttcagtagttattgccaatattgttgttggtcaatggcttgaagataaactttctaataattattatttctttgagtagctcagacttggttttgccaaaactcttggtaatttttgaagatagactgtcttatcaccaaggaaatttatacaaattaagactaactttcttggaattcactattctggcaataaattttggtagactaatacagtacagctagacccagaaatttggaaggctgtagatcagaggttctagttccctttccctccttttatatcctcctctccttgagtaatgaagtgaccagcctgtgtagtgtgacaaacgtgtctcattcagcaggaaaaactaatgatatggatcatcacccagattctctcacttggtaccagcatttctgtaggtattagagaagagttctaagttttctaaaccttaactgttccttaaggattttagccagtattttaatagaacatgattaatgaaagtgacaaattttaaattttctctaatagtcctcatcataaactttttaaaggaaaataagcaaactaaaaagaacattggtttagataaatacttatactttgcaaagtcaaaaatggcttgatttttggaaacaatatagaggtattcatatttaaatgagggtttacatttgttttgttttgtaaccgttaaaaagaagttgtttccagctaattattgtggtgtactatatttgtgagcctagggtaggggcactgctgcaacttctgctttcatcccatgcctcatcaatgaggaaagggaacaaagtgtataaaactgccacaattgtattttaattttgaggtatgatattttcagatatttcataatttctaacctctgttctctcagtaaacagaatgtctgatcgatcatgcagatacaatgttggtatttgagaggttagtttttttcctacacttttttttgccaactgacttaacaacattgctgtcaggtggaaatttcaagcacttttgcacatttagttcagtgtttgttgagaatccatggcttaacccacttgttttgctatttttttctttgcttttaattttccccatctgattttatctctgcgtttcagtgacctaccttaaaacaacacacgagaagagttaaactgggttcattttaatgatcaatttacctgcatataaaatttatttttaatcaagctgatcttaatgtatataatcattctatttgctttattatcggtgcaggtaggtcattaacaccacttcttttcatctgtaccacaccctggtgaaacctttgaagacataaaaaaaacctgtctgagatgttctttctaccaatctatatgtctttcggttatcaagtgtttctgcatggtaatgtcatgtaaatgctgatattgatttcactggtccatctatatttaaaacgtgcaagaaaaaaataaaatactctgctctagcaagttttgtgtaacaaaggcatatcgtcatgttaataaatttaaaacatcattcgtataaaatattttaattttcttgtatttcatttagacccaagaacatgctgaccaatgtgttctatatgtaaactacaaattctatggtagctttgttgtatattattgtaaaattattttaataagtcatggggatgacaatttgattattacaatttagttttcagtaatcaaaaagatttctatgaattctaaaaaatatttttttctatgaaattactagtgcccagctgtagaatctaccttaggtagatgatccctagacatacgttggttttgagggctattcagccattccattttactctctatttaaaggccgtgagcaagcttgtcatgagcaaatatgtcaagggagtcaatttctgaccaatcaagtacactaaattagaatatttttaaagtatgtaacattcccagtttcagccacaatttagccaagaataagataaaaacttgaataagaagtaagtagcataaatcagtatttaacctaaaattacatatttgaaacagaagatattatgttatgctcagtaaataattaagagatggcattgtgtaagaaggagccctagactgaaagtcaagacatctgaatttcaggctggaaaactatcagtatgatctcagcctcagttctcttgtctgtaaaatggaagaactggattaggcagtttgtaagattcctcctaactttcacagtcgatgacaagattgtctttttatctgatattttgaagggtatattgctttgaagtaagtctcaataaggcaatatattttagggcatctttcttcttatctctgacagtgttcttaaaattatttgaatatcataagagccttggtgtctgtcctaattcctttctcactcaccgatgctgaatacccagttgaatcaaactgtcaacctaccaaaaacgatattgtggcttatgggtattgctgtctcattcttggtatattcttgtgttaactgcccattggcctgaaaatactcattgtaagcctgaaaaaaaaaatctttcccactgttttttctgcttgttgtaagaatcaaatgaaataatgtatgtgaaagcaccttgtaaactgtaacctatcaatgtaaaatgttaaggtgtgttgttatttcattaattacttctttgtttagaatggaatttcctatgcactactgtagctaggaaatgctgaaaacaactgtgttttttaattaatcaataactgcaaaattaaagtaccttcaatggataagacaa

SEQ ID NO: 115 - DNA, 4650 bp, Homo sapiens
atgctgatataattgagaacatcttatacatcctggttcgaacattttctccctgccattttgagttgttctagtggtatatgaaggaggctgggataactagcttgaaagaaattcagtctagttatagacatctttggcattaatctgatgtttactagtgatatctcatgctaggcagttatgctttgcttctaggggcttctctttttaaaacaaaagaaagctcttttcgttttctgtgtgctgcatgctccagtgtgtgtgtttacaccatcggttcttctccctctagagattagcataactccctttgctgttggattgttattttgagcaatatgttttggaaaggttggttttcatcatgagtgcacgcaaatcatcagatgcatctgcttgctcctcttcagaaatatctgattcctttgtgaaagagtttctagccaaagccaaagaagactttttgaaaaaatgggagaatccaactcagaataatgccggacttgaagattttgaaaggaaaaaaacccttggaacaggttcatttggaagagtcatgttggtaaaacacaaagccactgaacagtattatgccatgaagatcttagataagcagaaggttgttaaactgaagcaaatagagcatactttgaatgagaaaagaatattacaggcagtgaattttcctttccttgttcgactggagtatgcttttaaggataattctaatttatacatggttatggaatatgtccctgggggtgaaatgttttcacatctaagaagaattggaaggttcagtgagccccatgcacggttctatgcagctcagatagtgctaacattcgagtacctccattcactagacctcatctacagagatctaaaacctgaaaatctcttaattgaccatcaaggctatatccaggtcacagactttgggtttgccaaaagagttaaaggcagaacttggacattatgtggaactccagagtatttggctccagaaataattctcagcaagggctacaataaggcagtggattggtgggcattaggagtgctaatctatgaaatggcagctggctatcccccattctttgcagaccaaccaattcagatttatgaaaagattgtttctggaaaggtccgattcccatcccacttcagttcagatctcaaggaccttctacggaacctgctgcaggtggatttgaccaagagatttggaaatctaaagaatggtgtcagtgatataaaaactcacaagtggtttgccacgacagattggattgctatttaccagaggaaggttgaagctccattcataccaaagtttagaggctctggagataccagcaactttgatgactatgaagaagaagatatccgtgtctctataacagaaaaatgtgcaaaagaatttggtgaattttaaagaggaacaagatgacatctgagctcacactcagtgtttgcactctgttgagagataaggtagagctgagaccgtccttgttgaagcagttacctagttccttcattccaacgactgagtgaggtctttattgccatcatcccgtgtgcgcactctgcatccacctatgtaacaaggcaccgctaagcaagcattgtctgtgccataacacagtactagaccactttcttacttctctttgggttgtctttctcctctcctatatccatttcttccttttccaatttcattggttttctctaaacagtgctccattttattttgttggtgtttcagatgggcagtgttatggctacgtgatatttgaagggaaggataagtgttgctttcagtagttattgccaatattgttgttggtcaatggcttgaagataaactttctaataattattatttctttgagtagctcagacttggttttgccaaaactcttggtaatttttgaagatagactgtcttatcaccaaggaaatttatacaaattaagactaactttcttggaattcactattctggcaataaattttggtagactaatacagtacagctagacccagaaatttggaaggctgtagatcagaggttctagttccctttccctccttttatatcctcctctccttgagtaatgaagtgaccagcctgtgtagtgtgacaaacgtgtctcattcagcaggaaaaactaatgatatggatcatcacccagattctctcacttggtaccagcatttctgtaggtattagagaagagttctaagttttctaaaccttaactgttccttaaggattttagccagtattttaatagaacatgattaatgaaagtgacaaattttaaattttctctaatagtcctcatcataaactttttaaaggaaaataagcaaactaaaaagaacattggtttagataaatacttatactttgcaaagtcaaaaatggcttgatttttggaaacaatatagaggtattcatatttaaatgagggtttacatttgttttgttttgtaaccgttaaaaagaagttgtttccagctaattattgtggtgtactatatttgtgagcctagggtaggggcactgctgcaacttctgctttcatcccatgcctcatcaatgaggaaagggaacaaagtgtataaaactgccacaattgtattttaattttgaggtatgatattttcagatatttcataatttctaacctctgttctctcagtaaacagaatgtctgatcgatcatgcagatacaatgttggtatttgagaggttagtttttttcctacacttttttttgccaactgacttaacaacattgctgtcaggtggaaatttcaagcacttttgcacatttagttcagtgtttgttgagaatccatggcttaacccacttgttttgctatttttttctttgcttttaattttccccatctgattttatctctgcgtttcagtgacctaccttaaaacaacacacgagaagagttaaactgggttcattttaatgatcaatttacctgcatataaaatttatttttaatcaagctgatcttaatgtatataatcattctatttgctttattatcggtgcaggtaggtcattaacaccacttcttttcatctgtaccacaccctggtgaaacctttgaagacataaaaaaaacctgtctgagatgttctttctaccaatctatatgtctttcggttatcaagtgtttctgcatggtaatgtcatgtaaatgctgatattgatttcactggtccatctatatttaaaacgtgcaagaaaaaaataaaatactctgctctagcaagttttgtgtaacaaaggcatatcgtcatgttaataaatttaaaacatcattcgtataaaatattttaattttcttgtatttcatttagacccaagaacatgctgaccaatgtgttctatatgtaaactacaaattctatggtagctttgttgtatattattgtaaaattattttaataagtcatggggatgacaatttgattattacaatttagttttcagtaatcaaaaagatttctatgaattctaaaaaatatttttttctatgaaattactagtgcccagctgtagaatctaccttaggtagatgatccctagacatacgttggttttgagggctattcagccattccattttactctctatttaaaggccgtgagcaagcttgtcatgagcaaatatgtcaagggagtcaatttctgaccaatcaagtacactaaattagaatatttttaaagtatgtaacattcccagtttcagccacaatttagccaagaataagataaaaacttgaataagaagtaagtagcataaatcagtatttaacctaaaattacatatttgaaacagaagatattatgttatgctcagtaaataattaagagatggcattgtgtaagaaggagccctagactgaaagtcaagacatctgaatttcaggctggaaaactatcagtatgatctcagcctcagttctcttgtctgtaaaatggaagaactggattaggcagtttgtaagattcctcctaactttcacagtcgatgacaagattgtctttttatctgatattttgaagggtatattgctttgaagtaagtctcaataaggcaatatattttagggcatctttcttcttatctctgacagtgttcttaaaattatttgaatatcataagagccttggtgtctgtcctaattcctttctcactcaccgatgctgaatacccagttgaatcaaactgtcaacctaccaaaaacgatattgtggcttatgggtattgctgtctcattcttggtatattcttgtgttaactgcccattggcctgaaaatactcattgtaagcctgaaaaaaaaaatctttcccactgttttttctgcttgttgtaagaatcaaatgaaataatgtatgtgaaagcaccttgtaaactgtaacctatcaatgtaaaatgttaaggtgtgttgttatttcattaattacttctttgtttagaatggaatttcctatgcactactgtagctaggaaatgctgaaaacaactgtgttttttaattaatcaataactgcaaaattaaagtaccttcaatggataagacaaaaaaaaaaaaaaaaaa

SEQ ID NO: 116 - DNA, 4506 bp, Homo sapiens
taacacagaatgtttaaatggttaacatttgtgctgcagtatagctttctggctcatgaaaaatgaaagctatcagcgatctcggcaataagattcatcgccaatagtcactagcaacagcacacagcattttaatatcagtgaggtccacagctagcagtaagagctggtgtaattgaaagacgtttaggtgcaatcattctgctgtttgctccttgccaggttcaacatgggattgtcacgcaaatcatcagatgcatctgcttgctcctcttcagaaatatctgtgaaagagtttctagccaaagccaaagaagactttttgaaaaaatgggagaatccaactcagaataatgccggacttgaagattttgaaaggaaaaaaacccttggaacaggttcatttggaagagtcatgttggtaaaacacaaagccactgaacagtattatgccatgaagatcttagataagcagaaggttgttaaactgaagcaaatagagcatactttgaatgagaaaagaatattacaggcagtgaattttcctttccttgttcgactggagtatgcttttaaggataattctaatttatacatggttatggaatatgtccctgggggtgaaatgttttcacatctaagaagaattggaaggttcagtgagccccatgcacggttctatgcagctcagatagtgctaacattcgagtacctccattcactagacctcatctacagagatctaaaacctgaaaatctcttaattgaccatcaaggctatatccaggtcacagactttgggtttgccaaaagagttaaaggcagaacttggacattatgtggaactccagagtatttggctccagaaataattctcagcaagggctacaataaggcagtggattggtgggcattaggagtgctaatctatgaaatggcagctggctatcccccattctttgcagaccaaccaattcagatttatgaaaagattgtttctggaaaggtccgattcccatcccacttcagttcagatctcaaggaccttctacggaacctgctgcaggtggatttgaccaagagatttggaaatctaaagaatggtgtcagtgatataaaaactcacaagtggtttgccacgacagattggattgctatttaccagaggaaggttgaagctccattcataccaaagtttagaggctctggagataccagcaactttgatgactatgaagaagaagatatccgtgtctctataacagaaaaatgtgcaaaagaatttggtgaattttaaagaggaacaagatgacatctgagctcacactcagtgtttgcactctgttgagagataaggtagagctgagaccgtccttgttgaagcagttacctagttccttcattccaacgactgagtgaggtctttattgccatcatcccgtgtgcgcactctgcatccacctatgtaacaaggcaccgctaagcaagcattgtctgtgccataacacagtactagaccactttcttacttctctttgggttgtctttctcctctcctatatccatttcttccttttccaatttcattggttttctctaaacagtgctccattttattttgttggtgtttcagatgggcagtgttatggctacgtgatatttgaagggaaggataagtgttgctttcagtagttattgccaatattgttgttggtcaatggcttgaagataaactttctaataattattatttctttgagtagctcagacttggttttgccaaaactcttggtaatttttgaagatagactgtcttatcaccaaggaaatttatacaaattaagactaactttcttggaattcactattctggcaataaattttggtagactaatacagtacagctagacccagaaatttggaaggctgtagatcagaggttctagttccctttccctccttttatatcctcctctccttgagtaatgaagtgaccagcctgtgtagtgtgacaaacgtgtctcattcagcaggaaaaactaatgatatggatcatcacccagattctctcacttggtaccagcatttctgtaggtattagagaagagttctaagttttctaaaccttaactgttccttaaggattttagccagtattttaatagaacatgattaatgaaagtgacaaattttaaattttctctaatagtcctcatcataaactttttaaaggaaaataagcaaactaaaaagaacattggtttagataaatacttatactttgcaaagtcaaaaatggcttgatttttggaaacaatatagaggtattcatatttaaatgagggtttacatttgttttgttttgtaaccgttaaaaagaagttgtttccagctaattattgtggtgtactatatttgtgagcctagggtaggggcactgctgcaacttctgctttcatcccatgcctcatcaatgaggaaagggaacaaagtgtataaaactgccacaattgtattttaattttgaggtatgatattttcagatatttcataatttctaacctctgttctctcagtaaacagaatgtctgatcgatcatgcagatacaatgttggtatttgagaggttagtttttttcctacacttttttttgccaactgacttaacaacattgctgtcaggtggaaatttcaagcacttttgcacatttagttcagtgtttgttgagaatccatggcttaacccacttgttttgctatttttttctttgcttttaattttccccatctgattttatctctgcgtttcagtgacctaccttaaaacaacacacgagaagagttaaactgggttcattttaatgatcaatttacctgcatataaaatttatttttaatcaagctgatcttaatgtatataatcattctatttgctttattatcggtgcaggtaggtcattaacaccacttcttttcatctgtaccacaccctggtgaaacctttgaagacataaaaaaaacctgtctgagatgttctttctaccaatctatatgtctttcggttatcaagtgtttctgcatggtaatgtcatgtaaatgctgatattgatttcactggtccatctatatttaaaacgtgcaagaaaaaaataaaatactctgctctagcaagttttgtgtaacaaaggcatatcgtcatgttaataaatttaaaacatcattcgtataaaatattttaattttcttgtatttcatttagacccaagaacatgctgaccaatgtgttctatatgtaaactacaaattctatggtagctttgttgtatattattgtaaaattattttaataagtcatggggatgacaatttgattattacaatttagttttcagtaatcaaaaagatttctatgaattctaaaaaatatttttttctatgaaattactagtgcccagctgtagaatctaccttaggtagatgatccctagacatacgttggttttgagggctattcagccattccattttactctctatttaaaggccgtgagcaagcttgtcatgagcaaatatgtcaagggagtcaatttctgaccaatcaagtacactaaattagaatatttttaaagtatgtaacattcccagtttcagccacaatttagccaagaataagataaaaacttgaataagaagtaagtagcataaatcagtatttaacctaaaattacatatttgaaacagaagatattatgttatgctcagtaaataattaagagatggcattgtgtaagaaggagccctagactgaaagtcaagacatctgaatttcaggctggaaaactatcagtatgatctcagcctcagttctcttgtctgtaaaatggaagaactggattaggcagtttgtaagattcctcctaactttcacagtcgatgacaagattgtctttttatctgatattttgaagggtatattgctttgaagtaagtctcaataaggcaatatattttagggcatctttcttcttatctctgacagtgttcttaaaattatttgaatatcataagagccttggtgtctgtcctaattcctttctcactcaccgatgctgaatacccagttgaatcaaactgtcaacctaccaaaaacgatattgtggcttatgggtattgctgtctcattcttggtatattcttgtgttaactgcccattggcctgaaaatactcattgtaagcctgaaaaaaaaaatctttcccactgttttttctgcttgttgtaagaatcaaatgaaataatgtatgtgaaagcaccttgtaaactgtaacctatcaatgtaaaatgttaaggtgtgttgttatttcattaattacttctttgtttagaatggaatttcctatgcactactgtagctaggaaatgctgaaaacaactgtgttttttaattaatcaataactgcaaaattaaagtaccttcaatggataagacaaaaaaaaaaaaaaaaaa

SEQ ID NO: 117 - DNA, 4458 bp, Homo sapiens
taacacagaatgtttaaatggttaacatttgtgctgcagtatagctttctggctcatgaaaaatgaaagctatcagcgatctcggcaataagattcatcgccaatagtcactagcaacagcacacagcattttaatatcagtgaggtccacagctagcagtaagagctggtgtaattgaaagacgtttaggtgcaatcattctgctgtttgctccttgccaggttcaacatgggattgttgaaagagtttctagccaaagccaaagaagactttttgaaaaaatgggagaatccaactcagaataatgccggacttgaagattttgaaaggaaaaaaacccttggaacaggttcatttggaagagtcatgttggtaaaacacaaagccactgaacagtattatgccatgaagatcttagataagcagaaggttgttaaactgaagcaaatagagcatactttgaatgagaaaagaatattacaggcagtgaattttcctttccttgttcgactggagtatgcttttaaggataattctaatttatacatggttatggaatatgtccctgggggtgaaatgttttcacatctaagaagaattggaaggttcagtgagccccatgcacggttctatgcagctcagatagtgctaacattcgagtacctccattcactagacctcatctacagagatctaaaacctgaaaatctcttaattgaccatcaaggctatatccaggtcacagactttgggtttgccaaaagagttaaaggcagaacttggacattatgtggaactccagagtatttggctccagaaataattctcagcaagggctacaataaggcagtggattggtgggcattaggagtgctaatctatgaaatggcagctggctatcccccattctttgcagaccaaccaattcagatttatgaaaagattgtttctggaaaggtccgattcccatcccacttcagttcagatctcaaggaccttctacggaacctgctgcaggtggatttgaccaagagatttggaaatctaaagaatggtgtcagtgatataaaaactcacaagtggtttgccacgacagattggattgctatttaccagaggaaggttgaagctccattcataccaaagtttagaggctctggagataccagcaactttgatgactatgaagaagaagatatccgtgtctctataacagaaaaatgtgcaaaagaatttggtgaattttaaagaggaacaagatgacatctgagctcacactcagtgtttgcactctgttgagagataaggtagagctgagaccgtccttgttgaagcagttacctagttccttcattccaacgactgagtgaggtctttattgccatcatcccgtgtgcgcactctgcatccacctatgtaacaaggcaccgctaagcaagcattgtctgtgccataacacagtactagaccactttcttacttctctttgggttgtctttctcctctcctatatccatttcttccttttccaatttcattggttttctctaaacagtgctccattttattttgttggtgtttcagatgggcagtgttatggctacgtgatatttgaagggaaggataagtgttgctttcagtagttattgccaatattgttgttggtcaatggcttgaagataaactttctaataattattatttctttgagtagctcagacttggttttgccaaaactcttggtaatttttgaagatagactgtcttatcaccaaggaaatttatacaaattaagactaactttcttggaattcactattctggcaataaattttggtagactaatacagtacagctagacccagaaatttggaaggctgtagatcagaggttctagttccctttccctccttttatatcctcctctccttgagtaatgaagtgaccagcctgtgtagtgtgacaaacgtgtctcattcagcaggaaaaactaatgatatggatcatcacccagattctctcacttggtaccagcatttctgtaggtattagagaagagttctaagttttctaaaccttaactgttccttaaggattttagccagtattttaatagaacatgattaatgaaagtgacaaattttaaattttctctaatagtcctcatcataaactttttaaaggaaaataagcaaactaaaaagaacattggtttagataaatacttatactttgcaaagtcaaaaatggcttgatttttggaaacaatatagaggtattcatatttaaatgagggtttacatttgttttgttttgtaaccgttaaaaagaagttgtttccagctaattattgtggtgtactatatttgtgagcctagggtaggggcactgctgcaacttctgctttcatcccatgcctcatcaatgaggaaagggaacaaagtgtataaaactgccacaattgtattttaattttgaggtatgatattttcagatatttcataatttctaacctctgttctctcagtaaacagaatgtctgatcgatcatgcagatacaatgttggtatttgagaggttagtttttttcctacacttttttttgccaactgacttaacaacattgctgtcaggtggaaatttcaagcacttttgcacatttagttcagtgtttgttgagaatccatggcttaacccacttgttttgctatttttttctttgcttttaattttccccatctgattttatctctgcgtttcagtgacctaccttaaaacaacacacgagaagagttaaactgggttcattttaatgatcaatttacctgcatataaaatttatttttaatcaagctgatcttaatgtatataatcattctatttgctttattatcggtgcaggtaggtcattaacaccacttcttttcatctgtaccacaccctggtgaaacctttgaagacataaaaaaaacctgtctgagatgttctttctaccaatctatatgtctttcggttatcaagtgtttctgcatggtaatgtcatgtaaatgctgatattgatttcactggtccatctatatttaaaacgtgcaagaaaaaaataaaatactctgctctagcaagttttgtgtaacaaaggcatatcgtcatgttaataaatttaaaacatcattcgtataaaatattttaattttcttgtatttcatttagacccaagaacatgctgaccaatgtgttctatatgtaaactacaaattctatggtagctttgttgtatattattgtaaaattattttaataagtcatggggatgacaatttgattattacaatttagttttcagtaatcaaaaagatttctatgaattctaaaaaatatttttttctatgaaattactagtgcccagctgtagaatctaccttaggtagatgatccctagacatacgttggttttgagggctattcagccattccattttactctctatttaaaggccgtgagcaagcttgtcatgagcaaatatgtcaagggagtcaatttctgaccaatcaagtacactaaattagaatatttttaaagtatgtaacattcccagtttcagccacaatttagccaagaataagataaaaacttgaataagaagtaagtagcataaatcagtatttaacctaaaattacatatttgaaacagaagatattatgttatgctcagtaaataattaagagatggcattgtgtaagaaggagccctagactgaaagtcaagacatctgaatttcaggctggaaaactatcagtatgatctcagcctcagttctcttgtctgtaaaatggaagaactggattaggcagtttgtaagattcctcctaactttcacagtcgatgacaagattgtctttttatctgatattttgaagggtatattgctttgaagtaagtctcaataaggcaatatattttagggcatctttcttcttatctctgacagtgttcttaaaattatttgaatatcataagagccttggtgtctgtcctaattcctttctcactcaccgatgctgaatacccagttgaatcaaactgtcaacctaccaaaaacgatattgtggcttatgggtattgctgtctcattcttggtatattcttgtgttaactgcccattggcctgaaaatactcattgtaagcctgaaaaaaaaaatctttcccactgttttttctgcttgttgtaagaatcaaatgaaataatgtatgtgaaagcaccttgtaaactgtaacctatcaatgtaaaatgttaaggtgtgttgttatttcattaattacttctttgtttagaatggaatttcctatgcactactgtagctaggaaatgctgaaaacaactgtgttttttaattaatcaataactgcaaaattaaagtaccttcaatggataagacaaaaaaaaaaaaaaaaaa

SEQ ID NO: 118 - DNA, 4254 bp, Homo sapiens
taaagagagaaagccactaggctctctcatgctgctactatctagttctataagcttatataaagacagaaatgaagcaagactgatttcttcacagaataatgccggacttgaagattttgaaaggaaaaaaacccttggaacaggttcatttggaagagtcatgttggtaaaacacaaagccactgaacagtattatgccatgaagatcttagataagcagaaggttgttaaactgaagcaaatagagcatactttgaatgagaaaagaatattacaggcagtgaattttcctttccttgttcgactggagtatgcttttaaggataattctaatttatacatggttatggaatatgtccctgggggtgaaatgttttcacatctaagaagaattggaaggttcagtgagccccatgcacggttctatgcagctcagatagtgctaacattcgagtacctccattcactagacctcatctacagagatctaaaacctgaaaatctcttaattgaccatcaaggctatatccaggtcacagactttgggtttgccaaaagagttaaaggcagaacttggacattatgtggaactccagagtatttggctccagaaataattctcagcaagggctacaataaggcagtggattggtgggcattaggagtgctaatctatgaaatggcagctggctatcccccattctttgcagaccaaccaattcagatttatgaaaagattgtttctggaaaggtccgattcccatcccacttcagttcagatctcaaggaccttctacggaacctgctgcaggtggatttgaccaagagatttggaaatctaaagaatggtgtcagtgatataaaaactcacaagtggtttgccacgacagattggattgctatttaccagaggaaggttgaagctccattcataccaaagtttagaggctctggagataccagcaactttgatgactatgaagaagaagatatccgtgtctctataacagaaaaatgtgcaaaagaatttggtgaattttaaagaggaacaagatgacatctgagctcacactcagtgtttgcactctgttgagagataaggtagagctgagaccgtccttgttgaagcagttacctagttccttcattccaacgactgagtgaggtctttattgccatcatcccgtgtgcgcactctgcatccacctatgtaacaaggcaccgctaagcaagcattgtctgtgccataacacagtactagaccactttcttacttctctttgggttgtctttctcctctcctatatccatttcttccttttccaatttcattggttttctctaaacagtgctccattttattttgttggtgtttcagatgggcagtgttatggctacgtgatatttgaagggaaggataagtgttgctttcagtagttattgccaatattgttgttggtcaatggcttgaagataaactttctaataattattatttctttgagtagctcagacttggttttgccaaaactcttggtaatttttgaagatagactgtcttatcaccaaggaaatttatacaaattaagactaactttcttggaattcactattctggcaataaattttggtagactaatacagtacagctagacccagaaatttggaaggctgtagatcagaggttctagttccctttccctccttttatatcctcctctccttgagtaatgaagtgaccagcctgtgtagtgtgacaaacgtgtctcattcagcaggaaaaactaatgatatggatcatcacccagattctctcacttggtaccagcatttctgtaggtattagagaagagttctaagttttctaaaccttaactgttccttaaggattttagccagtattttaatagaacatgattaatgaaagtgacaaattttaaattttctctaatagtcctcatcataaactttttaaaggaaaataagcaaactaaaaagaacattggtttagataaatacttatactttgcaaagtcaaaaatggcttgatttttggaaacaatatagaggtattcatatttaaatgagggtttacatttgttttgttttgtaaccgttaaaaagaagttgtttccagctaattattgtggtgtactatatttgtgagcctagggtaggggcactgctgcaacttctgctttcatcccatgcctcatcaatgaggaaagggaacaaagtgtataaaactgccacaattgtattttaattttgaggtatgatattttcagatatttcataatttctaacctctgttctctcagtaaacagaatgtctgatcgatcatgcagatacaatgttggtatttgagaggttagtttttttcctacacttttttttgccaactgacttaacaacattgctgtcaggtggaaatttcaagcacttttgcacatttagttcagtgtttgttgagaatccatggcttaacccacttgttttgctatttttttctttgcttttaattttccccatctgattttatctctgcgtttcagtgacctaccttaaaacaacacacgagaagagttaaactgggttcattttaatgatcaatttacctgcatataaaatttatttttaatcaagctgatcttaatgtatataatcattctatttgctttattatcggtgcaggtaggtcattaacaccacttcttttcatctgtaccacaccctggtgaaacctttgaagacataaaaaaaacctgtctgagatgttctttctaccaatctatatgtctttcggttatcaagtgtttctgcatggtaatgtcatgtaaatgctgatattgatttcactggtccatctatatttaaaacgtgcaagaaaaaaataaaatactctgctctagcaagttttgtgtaacaaaggcatatcgtcatgttaataaatttaaaacatcattcgtataaaatattttaattttcttgtatttcatttagacccaagaacatgctgaccaatgtgttctatatgtaaactacaaattctatggtagctttgttgtatattattgtaaaattattttaataagtcatggggatgacaatttgattattacaatttagttttcagtaatcaaaaagatttctatgaattctaaaaaatatttttttctatgaaattactagtgcccagctgtagaatctaccttaggtagatgatccctagacatacgttggttttgagggctattcagccattccattttactctctatttaaaggccgtgagcaagcttgtcatgagcaaatatgtcaagggagtcaatttctgaccaatcaagtacactaaattagaatatttttaaagtatgtaacattcccagtttcagccacaatttagccaagaataagataaaaacttgaataagaagtaagtagcataaatcagtatttaacctaaaattacatatttgaaacagaagatattatgttatgctcagtaaataattaagagatggcattgtgtaagaaggagccctagactgaaagtcaagacatctgaatttcaggctggaaaactatcagtatgatctcagcctcagttctcttgtctgtaaaatggaagaactggattaggcagtttgtaagattcctcctaactttcacagtcgatgacaagattgtctttttatctgatattttgaagggtatattgctttgaagtaagtctcaataaggcaatatattttagggcatctttcttcttatctctgacagtgttcttaaaattatttgaatatcataagagccttggtgtctgtcctaattcctttctcactcaccgatgctgaatacccagttgaatcaaactgtcaacctaccaaaaacgatattgtggcttatgggtattgctgtctcattcttggtatattcttgtgttaactgcccattggcctgaaaatactcattgtaagcctgaaaaaaaaaatctttcccactgttttttctgcttgttgtaagaatcaaatgaaataatgtatgtgaaagcaccttgtaaactgtaacctatcaatgtaaaatgttaaggtgtgttgttatttcattaattacttctttgtttagaatggaatttcctatgcactactgtagctaggaaatgctgaaaacaactgtgttttttaattaatcaataactgcaaaattaaagtaccttcaatggataagacaaaaaaaaaaaaaaaaaa

SEQ ID NO: 119 - DNA, 4542 bp, Homo sapiens
atgctgatataattgagaacatcttatacatcctggttcgaacattttctccctgccattttgagttgttctagtggtatatgaaggaggctgggataactagcttgaaagaaattcagtctagttatagacatctttggcattaatctgatgtttactagtgatatctcatgctaggcagttatgctttgcttctaggggcttctctttttaaaacaaaagaaagctcttttcgttttctgtgtgctgcatgctccagtgtgtgtgtttacaccatcggttcttctccctctagagattagcataactccctttgctgttggattgttattttgagcaatatgttttggaaaggttggttttcatcatgagtgcacgcaaatcatcagatgcatctgcttgctcctcttcagaaatatctgtgaaagagtttctagccaaagccaaagaagactttttgaaaaaatgggagaatccaactcagaataatgccggacttgaagattttgaaaggaaaaaaacccttggaacaggttcatttggaagagtcatgttggtaaaacacaaagccactgaacagtattatgccatgaagatcttagataagcagaaggataattctaatttatacatggttatggaatatgtccctgggggtgaaatgttttcacatctaagaagaattggaaggttcagtgagccccatgcacggttctatgcagctcagatagtgctaacattcgagtacctccattcactagacctcatctacagagatctaaaacctgaaaatctcttaattgaccatcaaggctatatccaggtcacagactttgggtttgccaaaagagttaaaggcagaacttggacattatgtggaactccagagtatttggctccagaaataattctcagcaagggctacaataaggcagtggattggtgggcattaggagtgctaatctatgaaatggcagctggctatcccccattctttgcagaccaaccaattcagatttatgaaaagattgtttctggaaaggtccgattcccatcccacttcagttcagatctcaaggaccttctacggaacctgctgcaggtggatttgaccaagagatttggaaatctaaagaatggtgtcagtgatataaaaactcacaagtggtttgccacgacagattggattgctatttaccagaggaaggttgaagctccattcataccaaagtttagaggctctggagataccagcaactttgatgactatgaagaagaagatatccgtgtctctataacagaaaaatgtgcaaaagaatttggtgaattttaaagaggaacaagatgacatctgagctcacactcagtgtttgcactctgttgagagataaggtagagctgagaccgtccttgttgaagcagttacctagttccttcattccaacgactgagtgaggtctttattgccatcatcccgtgtgcgcactctgcatccacctatgtaacaaggcaccgctaagcaagcattgtctgtgccataacacagtactagaccactttcttacttctctttgggttgtctttctcctctcctatatccatttcttccttttccaatttcattggttttctctaaacagtgctccattttattttgttggtgtttcagatgggcagtgttatggctacgtgatatttgaagggaaggataagtgttgctttcagtagttattgccaatattgttgttggtcaatggcttgaagataaactttctaataattattatttctttgagtagctcagacttggttttgccaaaactcttggtaatttttgaagatagactgtcttatcaccaaggaaatttatacaaattaagactaactttcttggaattcactattctggcaataaattttggtagactaatacagtacagctagacccagaaatttggaaggctgtagatcagaggttctagttccctttccctccttttatatcctcctctccttgagtaatgaagtgaccagcctgtgtagtgtgacaaacgtgtctcattcagcaggaaaaactaatgatatggatcatcacccagattctctcacttggtaccagcatttctgtaggtattagagaagagttctaagttttctaaaccttaactgttccttaaggattttagccagtattttaatagaacatgattaatgaaagtgacaaattttaaattttctctaatagtcctcatcataaactttttaaaggaaaataagcaaactaaaaagaacattggtttagataaatacttatactttgcaaagtcaaaaatggcttgatttttggaaacaatatagaggtattcatatttaaatgagggtttacatttgttttgttttgtaaccgttaaaaagaagttgtttccagctaattattgtggtgtactatatttgtgagcctagggtaggggcactgctgcaacttctgctttcatcccatgcctcatcaatgaggaaagggaacaaagtgtataaaactgccacaattgtattttaattttgaggtatgatattttcagatatttcataatttctaacctctgttctctcagtaaacagaatgtctgatcgatcatgcagatacaatgttggtatttgagaggttagtttttttcctacacttttttttgccaactgacttaacaacattgctgtcaggtggaaatttcaagcacttttgcacatttagttcagtgtttgttgagaatccatggcttaacccacttgttttgctatttttttctttgcttttaattttccccatctgattttatctctgcgtttcagtgacctaccttaaaacaacacacgagaagagttaaactgggttcattttaatgatcaatttacctgcatataaaatttatttttaatcaagctgatcttaatgtatataatcattctatttgctttattatcggtgcaggtaggtcattaacaccacttcttttcatctgtaccacaccctggtgaaacctttgaagacataaaaaaaacctgtctgagatgttctttctaccaatctatatgtctttcggttatcaagtgtttctgcatggtaatgtcatgtaaatgctgatattgatttcactggtccatctatatttaaaacgtgcaagaaaaaaataaaatactctgctctagcaagttttgtgtaacaaaggcatatcgtcatgttaataaatttaaaacatcattcgtataaaatattttaattttcttgtatttcatttagacccaagaacatgctgaccaatgtgttctatatgtaaactacaaattctatggtagctttgttgtatattattgtaaaattattttaataagtcatggggatgacaatttgattattacaatttagttttcagtaatcaaaaagatttctatgaattctaaaaaatatttttttctatgaaattactagtgcccagctgtagaatctaccttaggtagatgatccctagacatacgttggttttgagggctattcagccattccattttactctctatttaaaggccgtgagcaagcttgtcatgagcaaatatgtcaagggagtcaatttctgaccaatcaagtacactaaattagaatatttttaaagtatgtaacattcccagtttcagccacaatttagccaagaataagataaaaacttgaataagaagtaagtagcataaatcagtatttaacctaaaattacatatttgaaacagaagatattatgttatgctcagtaaataattaagagatggcattgtgtaagaaggagccctagactgaaagtcaagacatctgaatttcaggctggaaaactatcagtatgatctcagcctcagttctcttgtctgtaaaatggaagaactggattaggcagtttgtaagattcctcctaactttcacagtcgatgacaagattgtctttttatctgatattttgaagggtatattgctttgaagtaagtctcaataaggcaatatattttagggcatctttcttcttatctctgacagtgttcttaaaattatttgaatatcataagagccttggtgtctgtcctaattcctttctcactcaccgatgctgaatacccagttgaatcaaactgtcaacctaccaaaaacgatattgtggcttatgggtattgctgtctcattcttggtatattcttgtgttaactgcccattggcctgaaaatactcattgtaagcctgaaaaaaaaaatctttcccactgttttttctgcttgttgtaagaatcaaatgaaataatgtatgtgaaagcaccttgtaaactgtaacctatcaatgtaaaatgttaaggtgtgttgttatttcattaattacttctttgtttagaatggaatttcctatgcactactgtagctaggaaatgctgaaaacaactgtgttttttaattaatcaataactgcaaaattaaagtaccttcaatggataagacaaaaaaaaaaaaaaaaaa

SEQ ID NO: 120 - DNA, 2055 bp, Homo sapiens
gccattttgagttgttctagtggtatatgaaggaggctgggataactagcttgaaagaaattcagtctagttatagacatctttggcattaatctgatgtttactagtgatatctcatgctaggcagttatgctttgcttctaggggcttctctttttaaaacaaaagaaagctcttttcgttttctgtgtgctgcatgctccagtgtgtgtgtttacaccatcggttcttctccctctagagattagcataactccctttgctgttggattgttattttgagcaatatgttttggaaaggttggttttcatcatgagtgcacgcaaatcatcagatgcatctgcttgctcctcttcagaaatatctgattcctttgtgaaagagtttctagccaaagccaaagaagactttttgaaaaaatgggagaatccaactcagaataatgccggacttgaagattttgaaaggaaaaaaacccttggaacaggttcatttggaagagtcatgttggtaaaacacaaagccactgaacagtattatgccatgaagatcttagataagcagaaggttgttaaactgaagcaaatagagcatactttgaatgagaaaagaatattacaggcagtgaattttcctttccttgttcgactggagtatgcttttaaggataattctaatttatacatggttatggaatatgtccctgggggtgaaatgttttcacatctaagaagaattggaaggttcagtgagccccatgcacggttctatgcagctcagatagtgctaacattcgagtacctccattcactagacctcatctacagagatctaaaacctgaaaatctcttaattgaccatcaaggctatatccaggtcacagactttgggtttgccaaaagagttaaaggcagaacttggacattatgtggaactccagagtatttggctccagaaataattctcagcaagggctacaataaggcagtggattggtgggcattaggagtgctaatctatgaaatggcagctggctatcccccattctttgcagaccaaccaattcagatttatgaaaagattgtttctggaaagcagaacttttgatatgaacaaaacaaaactttgagaaaaattaacagacaaggcagtgatttatttttgaagaatttgagaagtgtagactctcaagaggactaaaggtcatatgaagaatgatgagagaaccaaaatacattaaaatcacaaatggaagaagaatattttactaatacaaaaactaagaatgtaaatgttataataattgtttcaaatcatttaattgacagtaattataaagttcttgaatctttactatattacttttatttatattcatataagaaatccaattttctaacaaggatactgtcataactaaatttacatttattaagaaaaactgctttagttaaaattaatgtgtcttcatttttatgcattggcctcgatttgccaatcattctctattggttaaattttatattcagctgtttatgaatatatattcattttatatcaaactttaaaattttgtatctaataatcagcatatattctaaaatcataacagtctaaatcctgggcaccttagaagaatgacaccagaaaaccttattatatcacaatattctgttttccccttcatttatttagaaatatgacaggatatttggtgtacttttgttttttaactaaaagtaccagattatctctccccatgtgggatataaaattatccccatctcttactccctttactcatctaaagtagaagtcatgaaagtggaatttttgccattaaaaggctctgtattatgtgaagttagattgtattaaccatttcccaataaatcatctgtttcaaaactcaaattcaaactagaatgtgtctctattcacattgcaaaaatattattgtctctctggttagtggctaaaagccaaattggaaactaactagttttttaaattttttaaattgtgcaaattattaaaaatccaatttggtctta

SEQ ID NO: 121 - DNA, 1968 bp, Homo sapiens
actgctgctgccaccgccgtcgccgccgccgccgccgccgccgctgctgctgccggtgctaaggagttcgctggagccctttcctcagacccggcccggtcttcgcgcccggactcctggcgccagcgctaggcgcactcaccgctctgacgggtgcagacgcgggagttgtcccagactgtggagtggcgggcacggccccagccccccttcccttccctgaccccttcttgccatcgccccagacatggggaacgcggcgaccgccaagaaaggcagcgaggtggagagcgtgaaagagtttctagccaaagccaaagaagactttttgaaaaaatgggagaatccaactcagaataatgccggacttgaagattttgaaaggaaaaaaacccttggaacaggttcatttggaagagtcatgttggtaaaacacaaagccactgaacagtattatgccatgaagatcttagataagcagaaggttgttaaactgaagcaaatagagcatactttgaatgagaaaagaatattacaggcagtgaattttcctttccttgttcgactggagtatgcttttaaggataattctaatttatacatggttatggaatatgtccctgggggtgaaatgttttcacatctaagaagaattggaaggttcagtgagccccatgcacggttctatgcagctcagatagtgctaacattcgagtacctccattcactagacctcatctacagagatctaaaacctgaaaatctcttaattgaccatcaaggctatatccaggtcacagactttgggtttgccaaaagagttaaaggcagaacttggacattatgtggaactccagagtatttggctccagaaataattctcagcaagggctacaataaggcagtggattggtgggcattaggagtgctaatctatgaaatggcagctggctatcccccattctttgcagaccaaccaattcagatttatgaaaagattgtttctggaaagaacttttgatatgaacaaaacaaaactttgagaaaaattaacagacaaggcagtgatttatttttgaagaatttgagaagtgtagactctcaagaggactaaaggtcatatgaagaatgatgagagaaccaaaatacattaaaatcacaaatggaagaagaatattttactaatacaaaaactaagaatgtaaatgttataataattgtttcaaatcatttaattgacagtaattataaagttcttgaatctttactatattacttttatttatattcatataagaaatccaattttctaacaaggatactgtcataactaaatttacatttattaagaaaaactgctttagttaaaattaatgtgtcttcatttttatgcattggcctcgatttgccaatcattctctattggttaaattttatattcagctgtttatgaatatatattcattttatatcaaactttaaaattttgtatctaataatcagcatatattctaaaatcataacagtctaaatcctgggcaccttagaagaatgacaccagaaaaccttattatatcacaatattctgttttccccttcatttatttagaaatatgacaggatatttggtgtacttttgttttttaactaaaagtaccagattatctctccccatgtgggatataaaattatccccatctcttactccctttactcatctaaagtagaagtcatgaaagtggaatttttgccattaaaaggctctgtattatgtgaagttagattgtattaaccatttcccaataaatcatctgtttcaaaactcaaattcaaactagaatgtgtctctattcacattgcaaaaatattattgtctctctggttagtggctaaaagccaaattggaaactaactagttttttaaattttttaaattgtgcaaattattaaaaatccaatttggtctta

SEQ ID NO: 122 - DNA, 4515 bp, Homo sapiens
taacacagaatgtttaaatggttaacatttgtgctgcagtatagctttctggctcatgaaaaatgaaagctatcagcgatctcggcaataagattcatcgccaatagtcactagcaacagcacacagcattttaatatcagtgaggtccacagctagcagtaagagctggtgtaattgaaagacgtttaggtgcaatcattctgctgtttgctccttgccaggttcaacatgggattgtcacgcaaatcatcagatgcatctgcttgctcctcttcagaaatatctgattcctttgtgaaagagtttctagccaaagccaaagaagactttttgaaaaaatgggagaatccaactcagaataatgccggacttgaagattttgaaaggaaaaaaacccttggaacaggttcatttggaagagtcatgttggtaaaacacaaagccactgaacagtattatgccatgaagatcttagataagcagaaggttgttaaactgaagcaaatagagcatactttgaatgagaaaagaatattacaggcagtgaattttcctttccttgttcgactggagtatgcttttaaggataattctaatttatacatggttatggaatatgtccctgggggtgaaatgttttcacatctaagaagaattggaaggttcagtgagccccatgcacggttctatgcagctcagatagtgctaacattcgagtacctccattcactagacctcatctacagagatctaaaacctgaaaatctcttaattgaccatcaaggctatatccaggtcacagactttgggtttgccaaaagagttaaaggcagaacttggacattatgtggaactccagagtatttggctccagaaataattctcagcaagggctacaataaggcagtggattggtgggcattaggagtgctaatctatgaaatggcagctggctatcccccattctttgcagaccaaccaattcagatttatgaaaagattgtttctggaaaggtccgattcccatcccacttcagttcagatctcaaggaccttctacggaacctgctgcaggtggatttgaccaagagatttggaaatctaaagaatggtgtcagtgatataaaaactcacaagtggtttgccacgacagattggattgctatttaccagaggaaggttgaagctccattcataccaaagtttagaggctctggagataccagcaactttgatgactatgaagaagaagatatccgtgtctctataacagaaaaatgtgcaaaagaatttggtgaattttaaagaggaacaagatgacatctgagctcacactcagtgtttgcactctgttgagagataaggtagagctgagaccgtccttgttgaagcagttacctagttccttcattccaacgactgagtgaggtctttattgccatcatcccgtgtgcgcactctgcatccacctatgtaacaaggcaccgctaagcaagcattgtctgtgccataacacagtactagaccactttcttacttctctttgggttgtctttctcctctcctatatccatttcttccttttccaatttcattggttttctctaaacagtgctccattttattttgttggtgtttcagatgggcagtgttatggctacgtgatatttgaagggaaggataagtgttgctttcagtagttattgccaatattgttgttggtcaatggcttgaagataaactttctaataattattatttctttgagtagctcagacttggttttgccaaaactcttggtaatttttgaagatagactgtcttatcaccaaggaaatttatacaaattaagactaactttcttggaattcactattctggcaataaattttggtagactaatacagtacagctagacccagaaatttggaaggctgtagatcagaggttctagttccctttccctccttttatatcctcctctccttgagtaatgaagtgaccagcctgtgtagtgtgacaaacgtgtctcattcagcaggaaaaactaatgatatggatcatcacccagattctctcacttggtaccagcatttctgtaggtattagagaagagttctaagttttctaaaccttaactgttccttaaggattttagccagtattttaatagaacatgattaatgaaagtgacaaattttaaattttctctaatagtcctcatcataaactttttaaaggaaaataagcaaactaaaaagaacattggtttagataaatacttatactttgcaaagtcaaaaatggcttgatttttggaaacaatatagaggtattcatatttaaatgagggtttacatttgttttgttttgtaaccgttaaaaagaagttgtttccagctaattattgtggtgtactatatttgtgagcctagggtaggggcactgctgcaacttctgctttcatcccatgcctcatcaatgaggaaagggaacaaagtgtataaaactgccacaattgtattttaattttgaggtatgatattttcagatatttcataatttctaacctctgttctctcagtaaacagaatgtctgatcgatcatgcagatacaatgttggtatttgagaggttagtttttttcctacacttttttttgccaactgacttaacaacattgctgtcaggtggaaatttcaagcacttttgcacatttagttcagtgtttgttgagaatccatggcttaacccacttgttttgctatttttttctttgcttttaattttccccatctgattttatctctgcgtttcagtgacctaccttaaaacaacacacgagaagagttaaactgggttcattttaatgatcaatttacctgcatataaaatttatttttaatcaagctgatcttaatgtatataatcattctatttgctttattatcggtgcaggtaggtcattaacaccacttcttttcatctgtaccacaccctggtgaaacctttgaagacataaaaaaaacctgtctgagatgttctttctaccaatctatatgtctttcggttatcaagtgtttctgcatggtaatgtcatgtaaatgctgatattgatttcactggtccatctatatttaaaacgtgcaagaaaaaaataaaatactctgctctagcaagttttgtgtaacaaaggcatatcgtcatgttaataaatttaaaacatcattcgtataaaatattttaattttcttgtatttcatttagacccaagaacatgctgaccaatgtgttctatatgtaaactacaaattctatggtagctttgttgtatattattgtaaaattattttaataagtcatggggatgacaatttgattattacaatttagttttcagtaatcaaaaagatttctatgaattctaaaaaatatttttttctatgaaattactagtgcccagctgtagaatctaccttaggtagatgatccctagacatacgttggttttgagggctattcagccattccattttactctctatttaaaggccgtgagcaagcttgtcatgagcaaatatgtcaagggagtcaatttctgaccaatcaagtacactaaattagaatatttttaaagtatgtaacattcccagtttcagccacaatttagccaagaataagataaaaacttgaataagaagtaagtagcataaatcagtatttaacctaaaattacatatttgaaacagaagatattatgttatgctcagtaaataattaagagatggcattgtgtaagaaggagccctagactgaaagtcaagacatctgaatttcaggctggaaaactatcagtatgatctcagcctcagttctcttgtctgtaaaatggaagaactggattaggcagtttgtaagattcctcctaactttcacagtcgatgacaagattgtctttttatctgatattttgaagggtatattgctttgaagtaagtctcaataaggcaatatattttagggcatctttcttcttatctctgacagtgttcttaaaattatttgaatatcataagagccttggtgtctgtcctaattcctttctcactcaccgatgctgaatacccagttgaatcaaactgtcaacctaccaaaaacgatattgtggcttatgggtattgctgtctcattcttggtatattcttgtgttaactgcccattggcctgaaaatactcattgtaagcctgaaaaaaaaaatctttcccactgttttttctgcttgttgtaagaatcaaatgaaataatgtatgtgaaagcaccttgtaaactgtaacctatcaatgtaaaatgttaaggtgtgttgttatttcattaattacttctttgtttagaatggaatttcctatgcactactgtagctaggaaatgctgaaaacaactgtgttttttaattaatcaataactgcaaaattaaagtaccttcaatggataagacaaaaaaaaaaaaaaaaaa

SEQ ID NO: 123 - DNA, 1793 bp, Homo sapiens
acacagcattttaatatcagtgaggtccacagctagcagtaagagctggtgtaattgaaagacgtttaggtgcaatcattctgctgtttgctccttgccaggttcaacatgggattgttgaaagagtttctagccaaagccaaagaagactttttgaaaaaatgggagaatccaactcagaataatgccggacttgaagattttgaaaggaaaaaaacccttggaacaggttcatttggaagagtcatgttggtaaaacacaaagccactgaacagtattatgccatgaagatcttagataagcagaaggttgttaaactgaagcaaatagagcatactttgaatgagaaaagaatattacaggcagtgaattttcctttccttgttcgactggagtatgcttttaaggataattctaatttatacatggttatggaatatgtccctgggggtgaaatgttttcacatctaagaagaattggaaggttcagtgagccccatgcacggttctatgcagctcagatagtgctaacattcgagtacctccattcactagacctcatctacagagatctaaaacctgaaaatctcttaattgaccatcaaggctatatccaggtcacagactttgggtttgccaaaagagttaaaggcagaacttggacattatgtggaactccagagtatttggctccagaaataattctcagcaagggctacaataaggcagtggattggtgggcattaggagtgctaatctatgaaatggcagctggctatcccccattctttgcagaccaaccaattcagatttatgaaaagattgtttctggaaagaacttttgatatgaacaaaacaaaactttgagaaaaattaacagacaaggcagtgatttatttttgaagaatttgagaagtgtagactctcaagaggactaaaggtcatatgaagaatgatgagagaaccaaaatacattaaaatcacaaatggaagaagaatattttactaatacaaaaactaagaatgtaaatgttataataattgtttcaaatcatttaattgacagtaattataaagttcttgaatctttactatattacttttatttatattcatataagaaatccaattttctaacaaggatactgtcataactaaatttacatttattaagaaaaactgctttagttaaaattaatgtgtcttcatttttatgcattggcctcgatttgccaatcattctctattggttaaattttatattcagctgtttatgaatatatattcattttatatcaaactttaaaattttgtatctaataatcagcatatattctaaaatcataacagtctaaatcctgggcaccttagaagaatgacaccagaaaaccttattatatcacaatattctgttttccccttcatttatttagaaatatgacaggatatttggtgtacttttgttttttaactaaaagtaccagattatctctccccatgtgggatataaaattatccccatctcttactccctttactcatctaaagtagaagtcatgaaagtggaatttttgccattaaaaggctctgtattatgtgaagttagattgtattaaccatttcccaataaatcatctgtttcaaaactcaaattcaaactagaatgtgtctctattcacattgcaaaaatattattgtctctctggttagtggctaaaagccaaattggaaactaactagttttttaaattttttaaattgtgcaaattattaaaaatccaatttggtctta

SEQ ID NO: 124 - protein, 351 aa, Homo sapiens
MGNAATAKKGSEVESVKEFLAKAKEDFLKKWENPTQNNAGLEDFERKKTLGTGSFGRVMLVKHKATEQYYAMKILDKQKVVKLKQIEHTLNEKRILQAVNFPFLVRLEYAFKDNSNLYMVMEYVPGGEMFSHLRRIGRFSEPHARFYAAQIVLTFEYLHSLDLIYRDLKPENLLIDHQGYIQVTDFGFAKRVKGRTWTLCGTPEYLAPEIILSKGYNKAVDWWALGVLIYEMAAGYPPFFADQPIQIYEKIVSGKVRFPSHFSSDLKDLLRNLLQVDLTKRFGNLKNGVSDIKTHKWFATTDWIAIYQRKVEAPFIPKFRGSGDTSNFDDYEEEDIRVSITEKCAKEFGEF

SEQ ID NO: 125 - protein, 398 aa, Homo sapiens
MAAYREPPCNQYTGTTTALQKLEGFASRLFHRHSKGTAHDQKTALENDSLHFSEHTALWDRSMKEFLAKAKEDFLKKWENPTQNNAGLEDFERKKTLGTGSFGRVMLVKHKATEQYYAMKILDKQKVVKLKQIEHTLNEKRILQAVNFPFLVRLEYAFKDNSNLYMVMEYVPGGEMFSHLRRIGRFSEPHARFYAAQIVLTFEYLHSLDLIYRDLKPENLLIDHQGYIQVTDFGFAKRVKGRTWTLCGTPEYLAPEIILSKGYNKAVDWWALGVLIYEMAAGYPPFFADQPIQIYEKIVSGKVRFPSHFSSDLKDLLRNLLQVDLTKRFGNLKNGVSDIKTHKWFATTDWIAIYQRKVEAPFIPKFRGSGDTSNFDDYEEEDIRVSITEKCAKEFGEF

SEQ ID NO: 126 - protein, 357 aa, Homo sapiens
MSARKSSDASACSSSEISDSFVKEFLAKAKEDFLKKWENPTQNNAGLEDFERKKTLGTGSFGRVMLVKHKATEQYYAMKILDKQKVVKLKQIEHTLNEKRILQAVNFPFLVRLEYAFKDNSNLYMVMEYVPGGEMFSHLRRIGRFSEPHARFYAAQIVLTFEYLHSLDLIYRDLKPENLLIDHQGYIQVTDFGFAKRVKGRTWTLCGTPEYLAPEIILSKGYNKAVDWWALGVLIYEMAAGYPPFFADQPIQIYEKIVSGKVRFPSHFSSDLKDLLRNLLQVDLTKRFGNLKNGVSDIKTHKWFATTDWIAIYQRKVEAPFIPKFRGSGDTSNFDDYEEEDIRVSITEKCAKEFGEF

SEQ ID NO: 127 - protein, 355 aa, Homo sapiens
MGLSRKSSDASACSSSEISVKEFLAKAKEDFLKKWENPTQNNAGLEDFERKKTLGTGSFGRVMLVKHKATEQYYAMKILDKQKVVKLKQIEHTLNEKRILQAVNFPFLVRLEYAFKDNSNLYMVMEYVPGGEMFSHLRRIGRFSEPHARFYAAQIVLTFEYLHSLDLIYRDLKPENLLIDHQGYIQVTDFGFAKRVKGRTWTLCGTPEYLAPEIILSKGYNKAVDWWALGVLIYEMAAGYPPFFADQPIQIYEKIVSGKVRFPSHFSSDLKDLLRNLLQVDLTKRFGNLKNGVSDIKTHKWFATTDWIAIYQRKVEAPFIPKFRGSGDTSNFDDYEEEDIRVSITEKCAKEFGEF

SEQ ID NO: 128 - protein, 339 aa, Homo sapiens
MGLLKEFLAKAKEDFLKKWENPTQNNAGLEDFERKKTLGTGSFGRVMLVKHKATEQYYAMKILDKQKVVKLKQIEHTLNEKRILQAVNFPFLVRLEYAFKDNSNLYMVMEYVPGGEMFSHLRRIGRFSEPHARFYAAQIVLTFEYLHSLDLIYRDLKPENLLIDHQGYIQVTDFGFAKRVKGRTWTLCGTPEYLAPEIILSKGYNKAVDWWALGVLIYEMAAGYPPFFADQPIQIYEKIVSGKVRFPSHFSSDLKDLLRNLLQVDLTKRFGNLKNGVSDIKTHKWFATTDWIAIYQRKVEAPFIPKFRGSGDTSNFDDYEEEDIRVSITEKCAKEFGEF

SEQ ID NO: 129 - protein, 338 aa, Homo sapiens
MLLLSSSISLYKDRNEARLISSQNNAGLEDFERKKTLGTGSFGRVMLVKHKATEQYYAMKILDKQKVVKLKQIEHTLNEKRILQAVNFPFLVRLEYAFKDNSNLYMVMEYVPGGEMFSHLRRIGRFSEPHARFYAAQIVLTFEYLHSLDLIYRDLKPENLLIDHQGYIQVTDFGFAKRVKGRTWTLCGTPEYLAPEIILSKGYNKAVDWWALGVLIYEMAAGYPPFFADQPIQIYEKIVSGKVRFPSHFSSDLKDLLRNLLQVDLTKRFGNLKNGVSDIKTHKWFATTDWIAIYQRKVEAPFIPKFRGSGDTSNFDDYEEEDIRVSITEKCAKEFGEF

SEQ ID NO: 130 - protein, 321 aa, Homo sapiens
MSARKSSDASACSSSEISVKEFLAKAKEDFLKKWENPTQNNAGLEDFERKKTLGTGSFGRVMLVKHKATEQYYAMKILDKQKDNSNLYMVMEYVPGGEMFSHLRRIGRFSEPHARFYAAQIVLTFEYLHSLDLIYRDLKPENLLIDHQGYIQVTDFGFAKRVKGRTWTLCGTPEYLAPEIILSKGYNKAVDWWALGVLIYEMAAGYPPFFADQPIQIYEKIVSGKVRFPSHFSSDLKDLLRNLLQVDLTKRFGNLKNGVSDIKTHKWFATTDWIAIYQRKVEAPFIPKFRGSGDTSNFDDYEEEDIRVSITEKCAKEFGEF

SEQ ID NO: 131 - protein, 264 aa, Homo sapiens
MSARKSSDASACSSSEISDSFVKEFLAKAKEDFLKKWENPTQNNAGLEDFERKKTLGTGSFGRVMLVKHKATEQYYAMKILDKQKVVKLKQIEHTLNEKRILQAVNFPFLVRLEYAFKDNSNLYMVMEYVPGGEMFSHLRRIGRFSEPHARFYAAQIVLTFEYLHSLDLIYRDLKPENLLIDHQGYIQVTDFGFAKRVKGRTWTLCGTPEYLAPEIILSKGYNKAVDWWALGVLIYEMAAGYPPFFADQPIQIYEKIVSGKQNF

SEQ ID NO: 132 - protein, 257 aa, Homo sapiens
MGNAATAKKGSEVESVKEFLAKAKEDFLKKWENPTQNNAGLEDFERKKTLGTGSFGRVMLVKHKATEQYYAMKILDKQKVVKLKQIEHTLNEKRILQAVNFPFLVRLEYAFKDNSNLYMVMEYVPGGEMFSHLRRIGRFSEPHARFYAAQIVLTFEYLHSLDLIYRDLKPENLLIDHQGYIQVTDFGFAKRVKGRTWTLCGTPEYLAPEIILSKGYNKAVDWWALGVLIYEMAAGYPPFFADQPIQIYEKIVSGKNF

SEQ ID NO: 133 - protein, 358 aa, Homo sapiens
MGLSRKSSDASACSSSEISDSFVKEFLAKAKEDFLKKWENPTQNNAGLEDFERKKTLGTGSFGRVMLVKHKATEQYYAMKILDKQKVVKLKQIEHTLNEKRILQAVNFPFLVRLEYAFKDNSNLYMVMEYVPGGEMFSHLRRIGRFSEPHARFYAAQIVLTFEYLHSLDLIYRDLKPENLLIDHQGYIQVTDFGFAKRVKGRTWTLCGTPEYLAPEIILSKGYNKAVDWWALGVLIYEMAAGYPPFFADQPIQIYEKIVSGKVRFPSHFSSDLKDLLRNLLQVDLTKRFGNLKNGVSDIKTHKWFATTDWIAIYQRKVEAPFIPKFRGSGDTSNFDDYEEEDIRVSITEKCAKEFGEF

SEQ ID NO: 134 - protein, 245 aa, Homo sapiens
MGLLKEFLAKAKEDFLKKWENPTQNNAGLEDFERKKTLGTGSFGRVMLVKHKATEQYYAMKILDKQKVVKLKQIEHTLNEKRILQAVNFPFLVRLEYAFKDNSNLYMVMEYVPGGEMFSHLRRIGRFSEPHARFYAAQIVLTFEYLHSLDLIYRDLKPENLLIDHQGYIQVTDFGFAKRVKGRTWTLCGTPEYLAPEIILSKGYNKAVDWWALGVLIYEMAAGYPPFFADQPIQIYEKIVSGKNF

SEQ ID NO: 135 - DNA, 5429 bp, Homo sapiens
agaacaacttttttgacttcctgcaaagaggacccttacagtatttttggagaagttagtaaaaccgaatctgacatcatcacctagcagttcatgcagctagcaagtggtttgttcttagggtaacagaggaggaaattgttcctcgtctgataagacaacagtggagaaaggacgcatgctgtttcttagggacacggctgacttccagatatgaccatgtatttgtggcttaaactcttggcatttggctttgcctttctggacacagaagtatttgtgacagggcaaagcccaacaccttcccccactggattgactacagcaaagatgcccagtgttccactttcaagtgaccccttacctactcacaccactgcattctcacccgcaagcacctttgaaagagaaaatgacttctcagagaccacaacttctcttagtccagacaatacttccacccaagtatccccggactctttggataatgctagtgcttttaataccacaggtgtttcatcagtacagacgcctcaccttcccacgcacgcagactcgcagacgccctctgctggaactgacacgcagacattcagcggctccgccgccaatgcaaaactcaaccctaccccaggcagcaatgctatctcagatgtcccaggagagaggagtacagccagcacctttcctacagacccagtttccccattgacaaccaccctcagccttgcacaccacagctctgctgccttacctgcacgcacctccaacaccaccatcacagcgaacacctcagatgcctaccttaatgcctctgaaacaaccactctgagcccttctggaagcgctgtcatttcaaccacaacaatagctactactccatctaagccaacatgtgatgaaaaatatgcaaacatcactgtggattacttatataacaaggaaactaaattatttacagcaaagctaaatgttaatgagaatgtggaatgtggaaacaatacttgcacaaacaatgaggtgcataaccttacagaatgtaaaaatgcgtctgtttccatatctcataattcatgtactgctcctgataagacattaatattagatgtgccaccaggggttgaaaagtttcagttacatgattgtacacaagttgaaaaagcagatactactatttgtttaaaatggaaaaatattgaaacctttacttgtgatacacagaatattacctacagatttcagtgtggtaatatgatatttgataataaagaaattaaattagaaaaccttgaacccgaacatgagtataagtgtgactcagaaatactctataataaccacaagtttactaacgcaagtaaaattattaaaacagattttgggagtccaggagagcctcagattattttttgtagaagtgaagctgcacatcaaggagtaattacctggaatccccctcaaagatcatttcataattttaccctctgttatataaaagagacagaaaaagattgcctcaatctggataaaaacctgatcaaatatgatttgcaaaatttaaaaccttatacgaaatatgttttatcattacatgcctacatcattgcaaaagtgcaacgtaatggaagtgctgcaatgtgtcatttcacaactaaaagtgctcctccaagccaggtctggaacatgactgtctccatgacatcagataatagtatgcatgtcaagtgtaggcctcccagggaccgtaatggcccccatgaacgttaccatttggaagttgaagctggaaatactctggttagaaatgagtcgcataagaattgcgatttccgtgtaaaagatcttcaatattcaacagactacacttttaaggcctattttcacaatggagactatcctggagaaccctttattttacatcattcaacatcttataattctaaggcactgatagcatttctggcatttctgattattgtgacatcaatagccctgcttgttgttctctacaaaatctatgatctacataagaaaagatcctgcaatttagatgaacagcaggagcttgttgaaagggatgatgaaaaacaactgatgaatgtggagccaatccatgcagatattttgttggaaacttataagaggaagattgctgatgaaggaagactttttctggctgaatttcagagcatcccgcgggtgttcagcaagtttcctataaaggaagctcgaaagccctttaaccagaataaaaaccgttatgttgacattcttccttatgattataaccgtgttgaactctctgagataaacggagatgcagggtcaaactacataaatgccagctatattgatggtttcaaagaacccaggaaatacattgctgcacaaggtcccagggatgaaactgttgatgatttctggaggatgatttgggaacagaaagccacagttattgtcatggtcactcgatgtgaagaaggaaacaggaacaagtgtgcagaatactggccgtcaatggaagagggcactcgggcttttggagatgttgttgtaaagatcaaccagcacaaaagatgtccagattacatcattcagaaattgaacattgtaaataaaaaagaaaaagcaactggaagagaggtgactcacattcagttcaccagctggccagaccacggggtgcctgaggatcctcacttgctcctcaaactgagaaggagagtgaatgccttcagcaatttcttcagtggtcccattgtggtgcactgcagtgctggtgttgggcgcacaggaacctatatcggaattgatgccatgctagaaggcctggaagccgagaacaaagtggatgtttatggttatgttgtcaagctaaggcgacagagatgcctgatggttcaagtagaggcccagtacatcttgatccatcaggctttggtggaatacaatcagtttggagaaacagaagtgaatttgtctgaattacatccatatctacataacatgaagaaaagggatccacccagtgagccgtctccactagaggctgaattccagagacttccttcatataggagctggaggacacagcacattggaaatcaagaagaaaataaaagtaaaaacaggaattctaatgtcatcccatatgactataacagagtgccacttaaacatgagctggaaatgagtaaagagagtgagcatgattcagatgaatcctctgatgatgacagtgattcagaggaaccaagcaaatacatcaatgcatcttttataatgagctactggaaacctgaagtgatgattgctgctcagggaccactgaaggagaccattggtgacttttggcagatgatcttccaaagaaaagtcaaagttattgttatgctgacagaactgaaacatggagaccaggaaatctgtgctcagtactggggagaaggaaagcaaacatatggagatattgaagttgacctgaaagacacagacaaatcttcaacttatacccttcgtgtctttgaactgagacattccaagaggaaagactctcgaactgtgtaccagtaccaatatacaaactggagtgtggagcagcttcctgcagaacccaaggaattaatctctatgattcaggtcgtcaaacaaaaacttccccagaagaattcctctgaagggaacaagcatcacaagagtacacctctactcattcactgcagggatggatctcagcaaacgggaatattttgtgctttgttaaatctcttagaaagtgcggaaacagaagaggtagtggatatttttcaagtggtaaaagctctacgcaaagctaggccaggcatggtttccacattcgagcaatatcaattcctatatgacgtcattgccagcacctaccctgctcagaatggacaagtaaagaaaaacaaccatcaagaagataaaattgaatttgataatgaagtggacaaagtaaagcaggatgctaattgtgttaatccacttggtgccccagaaaagctccctgaagcaaaggaacaggctgaaggttctgaacccacgagtggcactgaggggccagaacattctgtcaatggtcctgcaagtccagctttaaatcaaggttcataggaaaagacataaatgaggaaactccaaacctcctgttagctgttatttctatttttgtagaagtaggaagtgaaaataggtatacagtggattaattaaatgcagcgaaccaatatttgtagaagggttatattttactactgtggaaaaatatttaagatagttttgccagaacagtttgtacagacgtatgcttattttaaaattttatctcttattcagtaaaaaacaacttctttgtaatcgttatgtgtgtatatgtatgtgtgtatgggtgtgtgtttgtgtgagagacagagaaagagagagaattctttcaagtgaatctaaaagcttttgcttttcctttgtttttatgaagaaaaaatacattttatattagaagtgttaacttagcttgaaggatctgtttttaaaaatcataaactgtgtgcagactcaataaaatcatgtacatttctgaaatgacctcaagatgtcctccttgttctactcatatatatctatcttatatagtttactattttacttctagagatagtacataaaggtggtatgtgtgtgtatgctactacaaaaaagttgttaactaaattaacattgggaaatcttatattccatatattagcatttagtccaatgtctttttaagcttatttaattaaaaaatttccagtgagcttatcatgctgtctttacatggggttttcaattttgcatgctcgattattccctgtacaatatttaaaatttattgcttgatacttttgacaacaaattaggttttgtacaattgaacttaaataaatgtcattaaaataaataaatgcaatatgtattaatattcattgtataaaaatagaagaatacaaacatatttgttaaatatttacatatgaaatttaatatagctatttttatggaatttttcattgatatgaaaaatatgatattgcatatgcatagttcccatgttaaatcccattcataactttcattaaagcatttactttgaatttctccaatgcttagaatgtttttaccaggaatggatgtcgctaatcataataaaattcaaccattatttttttcttgtttataatacattgtgttatatgttcaaatatgaaatgtgtatgcacctattgaaatatgtttaatgcatttattaacatttgcaggacacttttacaggccccaattatccaatagtctaataattgtttaagatctagaaaaaaaaaatcaagaatagtggtatttttcatgaagtaataaaaactcgttttggtgaa

SEQ ID NO: 136 - DNA, 4946 bp, Homo sapiens
agaacaacttttttgacttcctgcaaagaggacccttacagtatttttggagaagttagtaaaaccgaatctgacatcatcacctagcagttcatgcagctagcaagtggtttgttcttagggtaacagaggaggaaattgttcctcgtctgataagacaacagtggagaaaggacgcatgctgtttcttagggacacggctgacttccagatatgaccatgtatttgtggcttaaactcttggcatttggctttgcctttctggacacagaagtatttgtgacagggcaaagcccaacaccttcccccactgatgcctaccttaatgcctctgaaacaaccactctgagcccttctggaagcgctgtcatttcaaccacaacaatagctactactccatctaagccaacatgtgatgaaaaatatgcaaacatcactgtggattacttatataacaaggaaactaaattatttacagcaaagctaaatgttaatgagaatgtggaatgtggaaacaatacttgcacaaacaatgaggtgcataaccttacagaatgtaaaaatgcgtctgtttccatatctcataattcatgtactgctcctgataagacattaatattagatgtgccaccaggggttgaaaagtttcagttacatgattgtacacaagttgaaaaagcagatactactatttgtttaaaatggaaaaatattgaaacctttacttgtgatacacagaatattacctacagatttcagtgtggtaatatgatatttgataataaagaaattaaattagaaaaccttgaacccgaacatgagtataagtgtgactcagaaatactctataataaccacaagtttactaacgcaagtaaaattattaaaacagattttgggagtccaggagagcctcagattattttttgtagaagtgaagctgcacatcaaggagtaattacctggaatccccctcaaagatcatttcataattttaccctctgttatataaaagagacagaaaaagattgcctcaatctggataaaaacctgatcaaatatgatttgcaaaatttaaaaccttatacgaaatatgttttatcattacatgcctacatcattgcaaaagtgcaacgtaatggaagtgctgcaatgtgtcatttcacaactaaaagtgctcctccaagccaggtctggaacatgactgtctccatgacatcagataatagtatgcatgtcaagtgtaggcctcccagggaccgtaatggcccccatgaacgttaccatttggaagttgaagctggaaatactctggttagaaatgagtcgcataagaattgcgatttccgtgtaaaagatcttcaatattcaacagactacacttttaaggcctattttcacaatggagactatcctggagaaccctttattttacatcattcaacatcttataattctaaggcactgatagcatttctggcatttctgattattgtgacatcaatagccctgcttgttgttctctacaaaatctatgatctacataagaaaagatcctgcaatttagatgaacagcaggagcttgttgaaagggatgatgaaaaacaactgatgaatgtggagccaatccatgcagatattttgttggaaacttataagaggaagattgctgatgaaggaagactttttctggctgaatttcagagcatcccgcgggtgttcagcaagtttcctataaaggaagctcgaaagccctttaaccagaataaaaaccgttatgttgacattcttccttatgattataaccgtgttgaactctctgagataaacggagatgcagggtcaaactacataaatgccagctatattgatggtttcaaagaacccaggaaatacattgctgcacaaggtcccagggatgaaactgttgatgatttctggaggatgatttgggaacagaaagccacagttattgtcatggtcactcgatgtgaagaaggaaacaggaacaagtgtgcagaatactggccgtcaatggaagagggcactcgggcttttggagatgttgttgtaaagatcaaccagcacaaaagatgtccagattacatcattcagaaattgaacattgtaaataaaaaagaaaaagcaactggaagagaggtgactcacattcagttcaccagctggccagaccacggggtgcctgaggatcctcacttgctcctcaaactgagaaggagagtgaatgccttcagcaatttcttcagtggtcccattgtggtgcactgcagtgctggtgttgggcgcacaggaacctatatcggaattgatgccatgctagaaggcctggaagccgagaacaaagtggatgtttatggttatgttgtcaagctaaggcgacagagatgcctgatggttcaagtagaggcccagtacatcttgatccatcaggctttggtggaatacaatcagtttggagaaacagaagtgaatttgtctgaattacatccatatctacataacatgaagaaaagggatccacccagtgagccgtctccactagaggctgaattccagagacttccttcatataggagctggaggacacagcacattggaaatcaagaagaaaataaaagtaaaaacaggaattctaatgtcatcccatatgactataacagagtgccacttaaacatgagctggaaatgagtaaagagagtgagcatgattcagatgaatcctctgatgatgacagtgattcagaggaaccaagcaaatacatcaatgcatcttttataatgagctactggaaacctgaagtgatgattgctgctcagggaccactgaaggagaccattggtgacttttggcagatgatcttccaaagaaaagtcaaagttattgttatgctgacagaactgaaacatggagaccaggaaatctgtgctcagtactggggagaaggaaagcaaacatatggagatattgaagttgacctgaaagacacagacaaatcttcaacttatacccttcgtgtctttgaactgagacattccaagaggaaagactctcgaactgtgtaccagtaccaatatacaaactggagtgtggagcagcttcctgcagaacccaaggaattaatctctatgattcaggtcgtcaaacaaaaacttccccagaagaattcctctgaagggaacaagcatcacaagagtacacctctactcattcactgcagggatggatctcagcaaacgggaatattttgtgctttgttaaatctcttagaaagtgcggaaacagaagaggtagtggatatttttcaagtggtaaaagctctacgcaaagctaggccaggcatggtttccacattcgagcaatatcaattcctatatgacgtcattgccagcacctaccctgctcagaatggacaagtaaagaaaaacaaccatcaagaagataaaattgaatttgataatgaagtggacaaagtaaagcaggatgctaattgtgttaatccacttggtgccccagaaaagctccctgaagcaaaggaacaggctgaaggttctgaacccacgagtggcactgaggggccagaacattctgtcaatggtcctgcaagtccagctttaaatcaaggttcataggaaaagacataaatgaggaaactccaaacctcctgttagctgttatttctatttttgtagaagtaggaagtgaaaataggtatacagtggattaattaaatgcagcgaaccaatatttgtagaagggttatattttactactgtggaaaaatatttaagatagttttgccagaacagtttgtacagacgtatgcttattttaaaattttatctcttattcagtaaaaaacaacttctttgtaatcgttatgtgtgtatatgtatgtgtgtatgggtgtgtgtttgtgtgagagacagagaaagagagagaattctttcaagtgaatctaaaagcttttgcttttcctttgtttttatgaagaaaaaatacattttatattagaagtgttaacttagcttgaaggatctgtttttaaaaatcataaactgtgtgcagactcaataaaatcatgtacatttctgaaatgacctcaagatgtcctccttgttctactcatatatatctatcttatatagtttactattttacttctagagatagtacataaaggtggtatgtgtgtgtatgctactacaaaaaagttgttaactaaattaacattgggaaatcttatattccatatattagcatttagtccaatgtctttttaagcttatttaattaaaaaatttccagtgagcttatcatgctgtctttacatggggttttcaattttgcatgctcgattattccctgtacaatatttaaaatttattgcttgatacttttgacaacaaattaggttttgtacaattgaacttaaataaatgtcattaaaataaataaatgcaatatgtattaatattcattgtataaaaatagaagaatacaaacatatttgttaaatatttacatatgaaatttaatatagctatttttatggaatttttcattgatatgaaaaatatgatattgcatatgcatagttcccatgttaaatcccattcataactttcattaaagcatttactttgaatttctccaatgcttagaatgtttttaccaggaatggatgtcgctaatcataataaaattcaaccattatttttttcttgtttataatacattgtgttatatgttcaaatatgaaatgtgtatgcacctattgaaatatgtttaatgcatttattaacatttgcaggacacttttacaggccccaattatccaatagtctaataattgtttaagatctagaaaaaaaaaatcaagaatagtggtatttttcatgaagtaataaaaactcgttttggtgaa

SEQ ID NO: 137 - protein, 1306 aa, Homo sapiens
MTMYLWLKLLAFGFAFLDTEVFVTGQSPTPSPTGLTTAKMPSVPLSSDPLPTHTTAFSPASTFERENDFSETTTSLSPDNTSTQVSPDSLDNASAFNTTGVSSVQTPHLPTHADSQTPSAGTDTQTFSGSAANAKLNPTPGSNAISDVPGERSTASTFPTDPVSPLTTTLSLAHHSSAALPARTSNTTITANTSDAYLNASETTTLSPSGSAVISTTTIATTPSKPTCDEKYANITVDYLYNKETKLFTAKLNVNENVECGNNTCTNNEVHNLTECKNASVSISHNSCTAPDKTLILDVPPGVEKFQLHDCTQVEKADTTICLKWKNIETFTCDTQNITYRFQCGNMIFDNKEIKLENLEPEHEYKCDSEILYNNHKFTNASKIIKTDFGSPGEPQIIFCRSEAAHQGVITWNPPQRSFHNFTLCYIKETEKDCLNLDKNLIKYDLQNLKPYTKYVLSLHAYIIAKVQRNGSAAMCHFTTKSAPPSQVWNMTVSMTSDNSMHVKCRPPRDRNGPHERYHLEVEAGNTLVRNESHKNCDFRVKDLQYSTDYTFKAYFHNGDYPGEPFILHHSTSYNSKALIAFLAFLIIVTSIALLVVLYKIYDLHKKRSCNLDEQQELVERDDEKQLMNVEPIHADILLETYKRKIADEGRLFLAEFQSIPRVFSKFPIKEARKPFNQNKNRYVDILPYDYNRVELSEINGDAGSNYINASYIDGFKEPRKYIAAQGPRDETVDDFWRMIWEQKATVIVMVTRCEEGNRNKCAEYWPSMEEGTRAFGDVVVKINQHKRCPDYIIQKLNIVNKKEKATGREVTHIQFTSWPDHGVPEDPHLLLKLRRRVNAFSNFFSGPIVVHCSAGVGRTGTYIGIDAMLEGLEAENKVDVYGYVVKLRRQRCLMVQVEAQYILIHQALVEYNQFGETEVNLSELHPYLHNMKKRDPPSEPSPLEAEFQRLPSYRSWRTQHIGNQEENKSKNRNSNVIPYDYNRVPLKHELEMSKESEHDSDESSDDDSDSEEPSKYINASFIMSYWKPEVMIAAQGPLKETIGDFWQMIFQRKVKVIVMLTELKHGDQEICAQYWGEGKQTYGDIEVDLKDTDKSSTYTLRVFELRHSKRKDSRTVYQYQYTNWSVEQLPAEPKELISMIQVVKQKLPQKNSSEGNKHHKSTPLLIHCRDGSQQTGIFCALLNLLESAETEEVVDIFQVVKALRKARPGMVSTFEQYQFLYDVIASTYPAQNGQVKKNNHQEDKIEFDNEVDKVKQDANCVNPLGAPEKLPEAKEQAEGSEPTSGTEGPEHSVNGPASPALNQGS

SEQ ID NO: 138 - protein, 1145 aa, Homo sapiens
MTMYLWLKLLAFGFAFLDTEVFVTGQSPTPSPTDAYLNASETTTLSPSGSAVISTTTIATTPSKPTCDEKYANITVDYLYNKETKLFTAKLNVNENVECGNNTCTNNEVHNLTECKNASVSISHNSCTAPDKTLILDVPPGVEKFQLHDCTQVEKADTTICLKWKNIETFTCDTQNITYRFQCGNMIFDNKEIKLENLEPEHEYKCDSEILYNNHKFTNASKIIKTDFGSPGEPQIIFCRSEAAHQGVITWNPPQRSFHNFTLCYIKETEKDCLNLDKNLIKYDLQNLKPYTKYVLSLHAYIIAKVQRNGSAAMCHFTTKSAPPSQVWNMTVSMTSDNSMHVKCRPPRDRNGPHERYHLEVEAGNTLVRNESHKNCDFRVKDLQYSTDYTFKAYFHNGDYPGEPFILHHSTSYNSKALIAFLAFLIIVTSIALLVVLYKIYDLHKKRSCNLDEQQELVERDDEKQLMNVEPIHADILLETYKRKIADEGRLFLAEFQSIPRVFSKFPIKEARKPFNQNKNRYVDILPYDYNRVELSEINGDAGSNYINASYIDGFKEPRKYIAAQGPRDETVDDFWRMIWEQKATVIVMVTRCEEGNRNKCAEYWPSMEEGTRAFGDVVVKINQHKRCPDYIIQKLNIVNKKEKATGREVTHIQFTSWPDHGVPEDPHLLLKLRRRVNAFSNFFSGPIVVHCSAGVGRTGTYIGIDAMLEGLEAENKVDVYGYVVKLRRQRCLMVQVEAQYILIHQALVEYNQFGETEVNLSELHPYLHNMKKRDPPSEPSPLEAEFQRLPSYRSWRTQHIGNQEENKSKNRNSNVIPYDYNRVPLKHELEMSKESEHDSDESSDDDSDSEEPSKYINASFIMSYWKPEVMIAAQGPLKETIGDFWQMIFQRKVKVIVMLTELKHGDQEICAQYWGEGKQTYGDIEVDLKDTDKSSTYTLRVFELRHSKRKDSRTVYQYQYTNWSVEQLPAEPKELISMIQVVKQKLPQKNSSEGNKHHKSTPLLIHCRDGSQQTGIFCALLNLLESAETEEVVDIFQVVKALRKARPGMVSTFEQYQFLYDVIASTYPAQNGQVKKNNHQEDKIEFDNEVDKVKQDANCVNPLGAPEKLPEAKEQAEGSEPTSGTEGPEHSVNGPASPALNQGS

SEQ ID NO: 139 - DNA, 6663 bp, Homo sapiens
actgaccccgctgtaccacggccctcttgcggacagccccggggacgtcgttgggacatcgctgggaccccgggctctgcagccacaaccatgtttggccggaagcgcagtgtctcctttgggggcttcggatggatcgacaagaccatgctggcaagtctgaaggtcaagaagcaggagctggccaacagctcggatgcgaccctcccagaccggccgctctcccctcctctcacggcacctcccaccatgaagtcgtcggagttctttgagatgctggagaaaatgcaggggatcaagcttgaagagcagaagccgggaccccagaagaacaaggacgactatatcccataccccagcatcgacgaggttgtggagaagggaggcccgtaccctcaggtcatcctgccacagtttgggggctattggatcgaggacccggagaacgtgggcaccccaacatcgctggggagcagcatctgtgaggaggaggaagaggacaacctcagccccaacacatttggctacaagctcgagtgcaagggtgaagccagggcctaccggaggcacttcctggggaaggatcatctaaacttttactgtaccggcagcagcctggggaacttgatcctgtccgtcaagtgcgaggaagcagaggggatcgagtacctccgggtcatccttaggtccaaactgaagacggtacatgagcggatccccttggctggactgagcaagcttcccagtgtccctcagattgcaaaggctttctgtgatgatgcagtgggactgagattcaatcctgtcctgtaccccaaggcctcccaaatgattgtgtcctatgatgagcatgaagtcaacaacacattcaaattcggagtcatttatcaaaaagccaggcagaccctggaggaggagctatttgggaacaatgaggagagcccagcttttaaggagttcttggacctgctgggggacacgatcacactgcaggatttcaaaggtttccgaggaggcctggacgtgacccacggacagacaggggtggaatcagtgtacacaacattccgggacagggagatcatgtttcacgtttccacaaagctgccatttaccgacggagacgcccagcagctccagagaaagagacacattggaaatgacatcgtggccatcatcttccaagaggaaaacacgccgtttgtcccagacatgatagcctccaatttcttacatgcctacatcgtcgtgcaggtcgagaccccaggcacagagaccccatcctacaaggtctctgtcactgcgcgggaagatgtgcccacctttggtccacctctgcccagtccccccgttttccagaagggcccggaattcagggagtttctgctcaccaagctcaccaatgccgagaacgcctgctgcaagtcggacaagtttgcaaagctggaggaccggaccagggctgccctcctggacaaccttcacgatgagctccacgcccacacacaggccatgctgggactgggcccagaggaggacaagtttgagaatggaggccacggggggttcctggagtcttttaagagggccatccgcgtacgcagccactccatggagaccatggtgggcggccagaagaagtcgcacagtgggggcatccctggcagcctcagcgggggcatctcccacaacagcatggaggtcaccaagaccaccttctcgcctccagtggtggcggcaacggtgaagaaccagtcacggagtcccatcaagcgacgctcggggctcttcccccgcctgcacacgggctcagaaggccagggcgacagccgggcacgatgtgacagcacatccagcacacccaagaccccagatggtggacactcctctcaggagataaagtctgagacctcatccaatcccagctctccggaaatctgccccaacaaggagaagcccttcatgaagttgaaggaaaacggccgtgccatctcccgctcctcctccagcaccagcagcgtcagcagcactgcaggggagggcgaggccatggaggagggcgacagtgggggcagccagccgtccacgacctcacccttcaagcaggaggtgtttgtctacagcccgtccccgagcagcgagagccccagcctgggggcagctgccaccccgatcatcatgagccggagtcccacagatgccaaaagcagaaactccccgagatcgaacctgaaattccgctttgacaagctcagccatgccagctctggtgcgggtcactaatgtgaaagtggagtccttcgcctgtccaagggaatcccctcttctgtcctggaaaaggctcctgtaccagcagtttgggagtgccgtccacgaccctgacagtcccagccctgctgccccatggccacgtgcccacagatgtgctgttggtccaggtgtcccagtctggccacagccctgcctccgccctcacctacatgccctcccagcccctcccatctctggacgaggcctccttcctcaggttcctcctgctcctgacctcccagtgtgatgtccgggtcctttatcatcctattcatcctggagaggaaaagtgtcgggcaaagggggatctggggggagctcagcagtgactggggagctggtctgcctcagagacagagtagggggtgggagcagagcctcggtgagggtcttggccacagggcagtgccttcctgaacgtggcaggctttactaccaggaacgcactcggtggtggaggccccatgttcccaggagccaagattcgtagcatccttgaggccatcctgataaaattcggcgctattgcccccgtagctctggagctctaaaccgtctatctgcttctgtgctgaacgcctttcccatctgctgacgtaggcccagggctgccctgcccctgctgccagtgtaccgtgagcggggctccagccagttcaagctcagagccagagctggacgggccagaactgcgctgcacacttcctggactgaggcggggactttgggtcccacccggtttctcctgattatggctgctgtggggtgaggggagggaggggcagccccgaggcagtctcttccctttgagaagatattttcccacaaaggggtgggaagccaggagtgagaaggaattcagggagagcaaaggagccagtgctgagatgctgctgtgttggttgaggaaaacctcgggcctgagggccaggccggagcccaggtctctgctgacaatgggggttcaaggaagacgtcgttatctcccctccccacttactcgaggagagaggtgagggggggatgacttgcgggttctgatcaggcccctgggtggggaaggggcacagtgtccctcagcagcttacgcccctggagtcttggggggcccagcctggccctggggccttttccagctactgtgcccttgggcagctgcgtctggggctcaaccccccaatcctgttcccctctccagctgcgggtctgtaggcagctgtcacatctgaagggtttctgcaacctggaccccatctgggtgtgggtcagaccctgtgacccacatgccacccccaccctccacagagcccccttgctgggacagccagctcacctccaaggacatcccctcctggcttctcccccttccgagtctgcagcgccgtgggcttctctgccgatgggcccgggttggggttaaggtgggcatcctccaggtacaacgagcctgaagagcccctttcagtgcagacggggctgcagagtgacactggctgggcacctgccccacgaccaatgacaaggatttccagctgaatgctttattcccatagggatctggacctgtgcccaagatataaatactacactttttttttttttttttaactgacattgtgaaattctccctatagcttttgccattcaagcaacattgtgatctttcttccccgccacgtgtgtgggaatgattgagtcctgtttgcaagctggagaggagctctccctttgctagtactttctctaaagtactagtctagtaaaatttattcttgttagaaggtcaacaaaatatctgtttagcttttatgaagagtcaccgtagcagcccccacggctggaaagaggcctgtacgttctggacgcgttttgttggctgggcttctggaggcactggcaaggtcaaactgcatttctttaagaacagttgcaggatctggctcgcctctgtgggaagccggcattacaggtgcttggtggatgggccgtgtcacattgccatctggggtcctttggggtttccaggttgtcaccatgctgtcccatttgggaatcccatacctgcctgtccccactgcgctggctgacccttgctgcctgctgcctcttgggagggctttgtccctgcctctgagctggtgggcaggatggctgggtggcccccagagaagcacagacctgagatggggtctccatgcccggtttgctgttggaatgatctgaacaggaccccaaatgcctcttccctctggtcatgcctcactatctctaggagctccatcctgtggcttccagagtgtgcacttccagcccacccgggcagtgctgagagggaggaggagaacaaggatggcccagcctcccctccctcccctagaccacggggcgggcagctcgggttcctggagggctgtttcccccacgctgtccctacatctgctctgatctaaaatgtctttccttttatgctgcgcccagtcttggggctcaaagatttgcccaaacctcattggccctcgtgactaggctcatctagatggtgctcacgctggtgtttgaggcatttccactgtgatctccacgaggggatgttttccgggacacatctctggctctgggaactgcctgactcactgaagaaactacttttcaggcactgtagggtcacccatatgcctccagctcagttgacgcttaaaaacaggtgcagaaaagctcgcgatggaaggtcttaatgagagtgtctgtctatgccaatcatgtaaaatgacgtttcttgaaaaagattcagtggttcagctttgtcagcatcatctcaacacaagcctgctggctctttttagcatctcatccaaccatgtcatcgtccagatgagaaatcttagcccaggtgaggggagtaacttgcttgaggtcacacagctggctgttggcaaagctgggattagaaccctcaacccagggtcccttcctctgcagcgcctacatggttggttgaataagtggctgcgtttcctggggccctgggttttggggaagccagttagctgctgctttggcactggcatggaggtgagcagtcaaggatgctggtgaggctgcagtttctgctctttttcatcaggggggatagtctctaggatttttcagtgaggacccttgggctttggatgcagcttgaaccaagaaaacgaggagggaaagggattcagtgaactattcctcagtgggatcggttcttcagctcctgatgggggctgtgtaatgggggcagaggccagggaaaaagatgctgttcacccaccctcagcttcccttttcctaaattaagaggaaaagtggtcaaagaaaaactcttcatttctccctgattcttaaacgaaggtggttaatagaaactcaggctcccgtgacaaggcaggacaagagcctgtttcgctttcctccctgaccctgccaggtgccaactcaaacactacctttctcattggtttctaagtcagtagagacagatctgttttaagcagttgggggttcgagtagatctcatgggtacaggaggccagcagggaccaggccagtcagccatgctcaggacccctcggctcctcccccagcctctagctaccctgtatcgaggcaaggggaggccagtaaagtttgccaagcctgatcctgcagcctggtggggctggctggggtattcttttaccaaactctgttttaccgccagccccttgtacaccccaatcccatgtctccctcccttcagctggaccgtgtgcccctttgggaggaagaagacaagccccactagggccaagggcagcagagccctgccgagtgagaggctgtggggcagcggctctgtcctgtgccttaccagccctggggaggggggcatttggctggaagactggaatttaattgccatcgtctttgattttgtgacatttctgcttggaagtgtgaactacccccccccccccgcttcctgctccttagcatgcgtgcagctctctcctgttttgggtgttccccttggacactccagctcggggactgctggcgtgtgaatgtgcagattcccctgtgtggtcgaacctaagaactgtggcttggaagtgatgctccatgtgacgacgactttgctttctttcctcttagtgaggaggtgattcgtagatcccaactgcctatgtaatgtaaataatgtacatttaatttattgctatggtagcacattgtatttgttaatgtacaaaacaaattctaaaaggttgacaaatgtatattttgttgcttaaatgtgtctttgcagaaattgacaataaataacatattttgtgtcca

SEQ ID NO: 140 - DNA, 6618 bp, Homo sapiens
actgaccccgctgtaccacggccctcttgcggacagccccggggacgtcgttgggacatcgctgggaccccgggctctgcagccacaaccatgtttggccggaagcgcagtgtctcctttgggggcttcggatggatcgacaagaccatgctggcaagtctgaaggtcaagaagcaggagctggccaacagctcggatgcgaccctcccagaccggccgctctcccctcctctcacggcacctcccaccatgaagtcgtcggagttctttgagatgctggagaaaatgcaggacgactatatcccataccccagcatcgacgaggttgtggagaagggaggcccgtaccctcaggtcatcctgccacagtttgggggctattggatcgaggacccggagaacgtgggcaccccaacatcgctggggagcagcatctgtgaggaggaggaagaggacaacctcagccccaacacatttggctacaagctcgagtgcaagggtgaagccagggcctaccggaggcacttcctggggaaggatcatctaaacttttactgtaccggcagcagcctggggaacttgatcctgtccgtcaagtgcgaggaagcagaggggatcgagtacctccgggtcatccttaggtccaaactgaagacggtacatgagcggatccccttggctggactgagcaagcttcccagtgtccctcagattgcaaaggctttctgtgatgatgcagtgggactgagattcaatcctgtcctgtaccccaaggcctcccaaatgattgtgtcctatgatgagcatgaagtcaacaacacattcaaattcggagtcatttatcaaaaagccaggcagaccctggaggaggagctatttgggaacaatgaggagagcccagcttttaaggagttcttggacctgctgggggacacgatcacactgcaggatttcaaaggtttccgaggaggcctggacgtgacccacggacagacaggggtggaatcagtgtacacaacattccgggacagggagatcatgtttcacgtttccacaaagctgccatttaccgacggagacgcccagcagctccagagaaagagacacattggaaatgacatcgtggccatcatcttccaagaggaaaacacgccgtttgtcccagacatgatagcctccaatttcttacatgcctacatcgtcgtgcaggtcgagaccccaggcacagagaccccatcctacaaggtctctgtcactgcgcgggaagatgtgcccacctttggtccacctctgcccagtccccccgttttccagaagggcccggaattcagggagtttctgctcaccaagctcaccaatgccgagaacgcctgctgcaagtcggacaagtttgcaaagctggaggaccggaccagggctgccctcctggacaaccttcacgatgagctccacgcccacacacaggccatgctgggactgggcccagaggaggacaagtttgagaatggaggccacggggggttcctggagtcttttaagagggccatccgcgtacgcagccactccatggagaccatggtgggcggccagaagaagtcgcacagtgggggcatccctggcagcctcagcgggggcatctcccacaacagcatggaggtcaccaagaccaccttctcgcctccagtggtggcggcaacggtgaagaaccagtcacggagtcccatcaagcgacgctcggggctcttcccccgcctgcacacgggctcagaaggccagggcgacagccgggcacgatgtgacagcacatccagcacacccaagaccccagatggtggacactcctctcaggagataaagtctgagacctcatccaatcccagctctccggaaatctgccccaacaaggagaagcccttcatgaagttgaaggaaaacggccgtgccatctcccgctcctcctccagcaccagcagcgtcagcagcactgcaggggagggcgaggccatggaggagggcgacagtgggggcagccagccgtccacgacctcacccttcaagcaggaggtgtttgtctacagcccgtccccgagcagcgagagccccagcctgggggcagctgccaccccgatcatcatgagccggagtcccacagatgccaaaagcagaaactccccgagatcgaacctgaaattccgctttgacaagctcagccatgccagctctggtgcgggtcactaatgtgaaagtggagtccttcgcctgtccaagggaatcccctcttctgtcctggaaaaggctcctgtaccagcagtttgggagtgccgtccacgaccctgacagtcccagccctgctgccccatggccacgtgcccacagatgtgctgttggtccaggtgtcccagtctggccacagccctgcctccgccctcacctacatgccctcccagcccctcccatctctggacgaggcctccttcctcaggttcctcctgctcctgacctcccagtgtgatgtccgggtcctttatcatcctattcatcctggagaggaaaagtgtcgggcaaagggggatctggggggagctcagcagtgactggggagctggtctgcctcagagacagagtagggggtgggagcagagcctcggtgagggtcttggccacagggcagtgccttcctgaacgtggcaggctttactaccaggaacgcactcggtggtggaggccccatgttcccaggagccaagattcgtagcatccttgaggccatcctgataaaattcggcgctattgcccccgtagctctggagctctaaaccgtctatctgcttctgtgctgaacgcctttcccatctgctgacgtaggcccagggctgccctgcccctgctgccagtgtaccgtgagcggggctccagccagttcaagctcagagccagagctggacgggccagaactgcgctgcacacttcctggactgaggcggggactttgggtcccacccggtttctcctgattatggctgctgtggggtgaggggagggaggggcagccccgaggcagtctcttccctttgagaagatattttcccacaaaggggtgggaagccaggagtgagaaggaattcagggagagcaaaggagccagtgctgagatgctgctgtgttggttgaggaaaacctcgggcctgagggccaggccggagcccaggtctctgctgacaatgggggttcaaggaagacgtcgttatctcccctccccacttactcgaggagagaggtgagggggggatgacttgcgggttctgatcaggcccctgggtggggaaggggcacagtgtccctcagcagcttacgcccctggagtcttggggggcccagcctggccctggggccttttccagctactgtgcccttgggcagctgcgtctggggctcaaccccccaatcctgttcccctctccagctgcgggtctgtaggcagctgtcacatctgaagggtttctgcaacctggaccccatctgggtgtgggtcagaccctgtgacccacatgccacccccaccctccacagagcccccttgctgggacagccagctcacctccaaggacatcccctcctggcttctcccccttccgagtctgcagcgccgtgggcttctctgccgatgggcccgggttggggttaaggtgggcatcctccaggtacaacgagcctgaagagcccctttcagtgcagacggggctgcagagtgacactggctgggcacctgccccacgaccaatgacaaggatttccagctgaatgctttattcccatagggatctggacctgtgcccaagatataaatactacactttttttttttttttttaactgacattgtgaaattctccctatagcttttgccattcaagcaacattgtgatctttcttccccgccacgtgtgtgggaatgattgagtcctgtttgcaagctggagaggagctctccctttgctagtactttctctaaagtactagtctagtaaaatttattcttgttagaaggtcaacaaaatatctgtttagcttttatgaagagtcaccgtagcagcccccacggctggaaagaggcctgtacgttctggacgcgttttgttggctgggcttctggaggcactggcaaggtcaaactgcatttctttaagaacagttgcaggatctggctcgcctctgtgggaagccggcattacaggtgcttggtggatgggccgtgtcacattgccatctggggtcctttggggtttccaggttgtcaccatgctgtcccatttgggaatcccatacctgcctgtccccactgcgctggctgacccttgctgcctgctgcctcttgggagggctttgtccctgcctctgagctggtgggcaggatggctgggtggcccccagagaagcacagacctgagatggggtctccatgcccggtttgctgttggaatgatctgaacaggaccccaaatgcctcttccctctggtcatgcctcactatctctaggagctccatcctgtggcttccagagtgtgcacttccagcccacccgggcagtgctgagagggaggaggagaacaaggatggcccagcctcccctccctcccctagaccacggggcgggcagctcgggttcctggagggctgtttcccccacgctgtccctacatctgctctgatctaaaatgtctttccttttatgctgcgcccagtcttggggctcaaagatttgcccaaacctcattggccctcgtgactaggctcatctagatggtgctcacgctggtgtttgaggcatttccactgtgatctccacgaggggatgttttccgggacacatctctggctctgggaactgcctgactcactgaagaaactacttttcaggcactgtagggtcacccatatgcctccagctcagttgacgcttaaaaacaggtgcagaaaagctcgcgatggaaggtcttaatgagagtgtctgtctatgccaatcatgtaaaatgacgtttcttgaaaaagattcagtggttcagctttgtcagcatcatctcaacacaagcctgctggctctttttagcatctcatccaaccatgtcatcgtccagatgagaaatcttagcccaggtgaggggagtaacttgcttgaggtcacacagctggctgttggcaaagctgggattagaaccctcaacccagggtcccttcctctgcagcgcctacatggttggttgaataagtggctgcgtttcctggggccctgggttttggggaagccagttagctgctgctttggcactggcatggaggtgagcagtcaaggatgctggtgaggctgcagtttctgctctttttcatcaggggggatagtctctaggatttttcagtgaggacccttgggctttggatgcagcttgaaccaagaaaacgaggagggaaagggattcagtgaactattcctcagtgggatcggttcttcagctcctgatgggggctgtgtaatgggggcagaggccagggaaaaagatgctgttcacccaccctcagcttcccttttcctaaattaagaggaaaagtggtcaaagaaaaactcttcatttctccctgattcttaaacgaaggtggttaatagaaactcaggctcccgtgacaaggcaggacaagagcctgtttcgctttcctccctgaccctgccaggtgccaactcaaacactacctttctcattggtttctaagtcagtagagacagatctgttttaagcagttgggggttcgagtagatctcatgggtacaggaggccagcagggaccaggccagtcagccatgctcaggacccctcggctcctcccccagcctctagctaccctgtatcgaggcaaggggaggccagtaaagtttgccaagcctgatcctgcagcctggtggggctggctggggtattcttttaccaaactctgttttaccgccagccccttgtacaccccaatcccatgtctccctcccttcagctggaccgtgtgcccctttgggaggaagaagacaagccccactagggccaagggcagcagagccctgccgagtgagaggctgtggggcagcggctctgtcctgtgccttaccagccctggggaggggggcatttggctggaagactggaatttaattgccatcgtctttgattttgtgacatttctgcttggaagtgtgaactacccccccccccccgcttcctgctccttagcatgcgtgcagctctctcctgttttgggtgttccccttggacactccagctcggggactgctggcgtgtgaatgtgcagattcccctgtgtggtcgaacctaagaactgtggcttggaagtgatgctccatgtgacgacgactttgctttctttcctcttagtgaggaggtgattcgtagatcccaactgcctatgtaatgtaaataatgtacatttaatttattgctatggtagcacattgtatttgttaatgtacaaaacaaattctaaaaggttgacaaatgtatattttgttgcttaaatgtgtctttgcagaaattgacaataaataacatattttgtgtcca

SEQ ID NO: 141 - DNA, 6719 bp, Homo sapiens
gtgcgctggggccggccggggtgcgcgcgtgcgcggcaggactgctgcgagggaccccgccgccccggaggaggaggaggaggaggaggaggaggaggagggggctgggccgagggagggggcgaccgcggggactgaggtgcccttcgctccgggtccagaggcagccgcgcgccaggcggcgcagaaggatcgacaagaccatgctggcaagtctgaaggtcaagaagcaggagctggccaacagctcggatgcgaccctcccagaccggccgctctcccctcctctcacggcacctcccaccatgaagtcgtcggagttctttgagatgctggagaaaatgcaggggatcaagcttgaagagcagaagccgggaccccagaagaacaaggacgactatatcccataccccagcatcgacgaggttgtggagaagggaggcccgtaccctcaggtcatcctgccacagtttgggggctattggatcgaggacccggagaacgtgggcaccccaacatcgctggggagcagcatctgtgaggaggaggaagaggacaacctcagccccaacacatttggctacaagctcgagtgcaagggtgaagccagggcctaccggaggcacttcctggggaaggatcatctaaacttttactgtaccggcagcagcctggggaacttgatcctgtccgtcaagtgcgaggaagcagaggggatcgagtacctccgggtcatccttaggtccaaactgaagacggtacatgagcggatccccttggctggactgagcaagcttcccagtgtccctcagattgcaaaggctttctgtgatgatgcagtgggactgagattcaatcctgtcctgtaccccaaggcctcccaaatgattgtgtcctatgatgagcatgaagtcaacaacacattcaaattcggagtcatttatcaaaaagccaggcagaccctggaggaggagctatttgggaacaatgaggagagcccagcttttaaggagttcttggacctgctgggggacacgatcacactgcaggatttcaaaggtttccgaggaggcctggacgtgacccacggacagacaggggtggaatcagtgtacacaacattccgggacagggagatcatgtttcacgtttccacaaagctgccatttaccgacggagacgcccagcagctccagagaaagagacacattggaaatgacatcgtggccatcatcttccaagaggaaaacacgccgtttgtcccagacatgatagcctccaatttcttacatgcctacatcgtcgtgcaggtcgagaccccaggcacagagaccccatcctacaaggtctctgtcactgcgcgggaagatgtgcccacctttggtccacctctgcccagtccccccgttttccagaagggcccggaattcagggagtttctgctcaccaagctcaccaatgccgagaacgcctgctgcaagtcggacaagtttgcaaagctggaggaccggaccagggctgccctcctggacaaccttcacgatgagctccacgcccacacacaggccatgctgggactgggcccagaggaggacaagtttgagaatggaggccacggggggttcctggagtcttttaagagggccatccgcgtacgcagccactccatggagaccatggtgggcggccagaagaagtcgcacagtgggggcatccctggcagcctcagcgggggcatctcccacaacagcatggaggtcaccaagaccaccttctcgcctccagtggtggcggcaacggtgaagaaccagtcacggagtcccatcaagcgacgctcggggctcttcccccgcctgcacacgggctcagaaggccagggcgacagccgggcacgatgtgacagcacatccagcacacccaagaccccagatggtggacactcctctcaggagataaagtctgagacctcatccaatcccagctctccggaaatctgccccaacaaggagaagcccttcatgaagttgaaggaaaacggccgtgccatctcccgctcctcctccagcaccagcagcgtcagcagcactgcaggggagggcgaggccatggaggagggcgacagtgggggcagccagccgtccacgacctcacccttcaagcaggaggtgtttgtctacagcccgtccccgagcagcgagagccccagcctgggggcagctgccaccccgatcatcatgagccggagtcccacagatgccaaaagcagaaactccccgagatcgaacctgaaattccgctttgacaagctcagccatgccagctctggtgcgggtcactaatgtgaaagtggagtccttcgcctgtccaagggaatcccctcttctgtcctggaaaaggctcctgtaccagcagtttgggagtgccgtccacgaccctgacagtcccagccctgctgccccatggccacgtgcccacagatgtgctgttggtccaggtgtcccagtctggccacagccctgcctccgccctcacctacatgccctcccagcccctcccatctctggacgaggcctccttcctcaggttcctcctgctcctgacctcccagtgtgatgtccgggtcctttatcatcctattcatcctggagaggaaaagtgtcgggcaaagggggatctggggggagctcagcagtgactggggagctggtctgcctcagagacagagtagggggtgggagcagagcctcggtgagggtcttggccacagggcagtgccttcctgaacgtggcaggctttactaccaggaacgcactcggtggtggaggccccatgttcccaggagccaagattcgtagcatccttgaggccatcctgataaaattcggcgctattgcccccgtagctctggagctctaaaccgtctatctgcttctgtgctgaacgcctttcccatctgctgacgtaggcccagggctgccctgcccctgctgccagtgtaccgtgagcggggctccagccagttcaagctcagagccagagctggacgggccagaactgcgctgcacacttcctggactgaggcggggactttgggtcccacccggtttctcctgattatggctgctgtggggtgaggggagggaggggcagccccgaggcagtctcttccctttgagaagatattttcccacaaaggggtgggaagccaggagtgagaaggaattcagggagagcaaaggagccagtgctgagatgctgctgtgttggttgaggaaaacctcgggcctgagggccaggccggagcccaggtctctgctgacaatgggggttcaaggaagacgtcgttatctcccctccccacttactcgaggagagaggtgagggggggatgacttgcgggttctgatcaggcccctgggtggggaaggggcacagtgtccctcagcagcttacgcccctggagtcttggggggcccagcctggccctggggccttttccagctactgtgcccttgggcagctgcgtctggggctcaaccccccaatcctgttcccctctccagctgcgggtctgtaggcagctgtcacatctgaagggtttctgcaacctggaccccatctgggtgtgggtcagaccctgtgacccacatgccacccccaccctccacagagcccccttgctgggacagccagctcacctccaaggacatcccctcctggcttctcccccttccgagtctgcagcgccgtgggcttctctgccgatgggcccgggttggggttaaggtgggcatcctccaggtacaacgagcctgaagagcccctttcagtgcagacggggctgcagagtgacactggctgggcacctgccccacgaccaatgacaaggatttccagctgaatgctttattcccatagggatctggacctgtgcccaagatataaatactacactttttttttttttttttaactgacattgtgaaattctccctatagcttttgccattcaagcaacattgtgatctttcttccccgccacgtgtgtgggaatgattgagtcctgtttgcaagctggagaggagctctccctttgctagtactttctctaaagtactagtctagtaaaatttattcttgttagaaggtcaacaaaatatctgtttagcttttatgaagagtcaccgtagcagcccccacggctggaaagaggcctgtacgttctggacgcgttttgttggctgggcttctggaggcactggcaaggtcaaactgcatttctttaagaacagttgcaggatctggctcgcctctgtgggaagccggcattacaggtgcttggtggatgggccgtgtcacattgccatctggggtcctttggggtttccaggttgtcaccatgctgtcccatttgggaatcccatacctgcctgtccccactgcgctggctgacccttgctgcctgctgcctcttgggagggctttgtccctgcctctgagctggtgggcaggatggctgggtggcccccagagaagcacagacctgagatggggtctccatgcccggtttgctgttggaatgatctgaacaggaccccaaatgcctcttccctctggtcatgcctcactatctctaggagctccatcctgtggcttccagagtgtgcacttccagcccacccgggcagtgctgagagggaggaggagaacaaggatggcccagcctcccctccctcccctagaccacggggcgggcagctcgggttcctggagggctgtttcccccacgctgtccctacatctgctctgatctaaaatgtctttccttttatgctgcgcccagtcttggggctcaaagatttgcccaaacctcattggccctcgtgactaggctcatctagatggtgctcacgctggtgtttgaggcatttccactgtgatctccacgaggggatgttttccgggacacatctctggctctgggaactgcctgactcactgaagaaactacttttcaggcactgtagggtcacccatatgcctccagctcagttgacgcttaaaaacaggtgcagaaaagctcgcgatggaaggtcttaatgagagtgtctgtctatgccaatcatgtaaaatgacgtttcttgaaaaagattcagtggttcagctttgtcagcatcatctcaacacaagcctgctggctctttttagcatctcatccaaccatgtcatcgtccagatgagaaatcttagcccaggtgaggggagtaacttgcttgaggtcacacagctggctgttggcaaagctgggattagaaccctcaacccagggtcccttcctctgcagcgcctacatggttggttgaataagtggctgcgtttcctggggccctgggttttggggaagccagttagctgctgctttggcactggcatggaggtgagcagtcaaggatgctggtgaggctgcagtttctgctctttttcatcaggggggatagtctctaggatttttcagtgaggacccttgggctttggatgcagcttgaaccaagaaaacgaggagggaaagggattcagtgaactattcctcagtgggatcggttcttcagctcctgatgggggctgtgtaatgggggcagaggccagggaaaaagatgctgttcacccaccctcagcttcccttttcctaaattaagaggaaaagtggtcaaagaaaaactcttcatttctccctgattcttaaacgaaggtggttaatagaaactcaggctcccgtgacaaggcaggacaagagcctgtttcgctttcctccctgaccctgccaggtgccaactcaaacactacctttctcattggtttctaagtcagtagagacagatctgttttaagcagttgggggttcgagtagatctcatgggtacaggaggccagcagggaccaggccagtcagccatgctcaggacccctcggctcctcccccagcctctagctaccctgtatcgaggcaaggggaggccagtaaagtttgccaagcctgatcctgcagcctggtggggctggctggggtattcttttaccaaactctgttttaccgccagccccttgtacaccccaatcccatgtctccctcccttcagctggaccgtgtgcccctttgggaggaagaagacaagccccactagggccaagggcagcagagccctgccgagtgagaggctgtggggcagcggctctgtcctgtgccttaccagccctggggaggggggcatttggctggaagactggaatttaattgccatcgtctttgattttgtgacatttctgcttggaagtgtgaactacccccccccccccgcttcctgctccttagcatgcgtgcagctctctcctgttttgggtgttccccttggacactccagctcggggactgctggcgtgtgaatgtgcagattcccctgtgtggtcgaacctaagaactgtggcttggaagtgatgctccatgtgacgacgactttgctttctttcctcttagtgaggaggtgattcgtagatcccaactgcctatgtaatgtaaataatgtacatttaatttattgctatggtagcacattgtatttgttaatgtacaaaacaaattctaaaaggttgacaaatgtatattttgttgcttaaatgtgtctttgcagaaattgacaataaataacatattttgtgtcca

SEQ ID NO: 142 - protein, 730 aa, Homo sapiens
MFGRKRSVSFGGFGWIDKTMLASLKVKKQELANSSDATLPDRPLSPPLTAPPTMKSSEFFEMLEKMQGIKLEEQKPGPQKNKDDYIPYPSIDEVVEKGGPYPQVILPQFGGYWIEDPENVGTPTSLGSSICEEEEEDNLSPNTFGYKLECKGEARAYRRHFLGKDHLNFYCTGSSLGNLILSVKCEEAEGIEYLRVILRSKLKTVHERIPLAGLSKLPSVPQIAKAFCDDAVGLRFNPVLYPKASQMIVSYDEHEVNNTFKFGVIYQKARQTLEEELFGNNEESPAFKEFLDLLGDTITLQDFKGFRGGLDVTHGQTGVESVYTTFRDREIMFHVSTKLPFTDGDAQQLQRKRHIGNDIVAIIFQEENTPFVPDMIASNFLHAYIVVQVETPGTETPSYKVSVTAREDVPTFGPPLPSPPVFQKGPEFREFLLTKLTNAENACCKSDKFAKLEDRTRAALLDNLHDELHAHTQAMLGLGPEEDKFENGGHGGFLESFKRAIRVRSHSMETMVGGQKKSHSGGIPGSLSGGISHNSMEVTKTTFSPPVVAATVKNQSRSPIKRRSGLFPRLHTGSEGQGDSRARCDSTSSTPKTPDGGHSSQEIKSETSSNPSSPEICPNKEKPFMKLKENGRAISRSSSSTSSVSSTAGEGEAMEEGDSGGSQPSTTSPFKQEVFVYSPSPSSESPSLGAAATPIIMSRSPTDAKSRNSPRSNLKFRFDKLSHASSGAGH

SEQ ID NO: 143 - protein, 715 aa, Homo sapiens
MFGRKRSVSFGGFGWIDKTMLASLKVKKQELANSSDATLPDRPLSPPLTAPPTMKSSEFFEMLEKMQDDYIPYPSIDEVVEKGGPYPQVILPQFGGYWIEDPENVGTPTSLGSSICEEEEEDNLSPNTFGYKLECKGEARAYRRHFLGKDHLNFYCTGSSLGNLILSVKCEEAEGIEYLRVILRSKLKTVHERIPLAGLSKLPSVPQIAKAFCDDAVGLRFNPVLYPKASQMIVSYDEHEVNNTFKFGVIYQKARQTLEEELFGNNEESPAFKEFLDLLGDTITLQDFKGFRGGLDVTHGQTGVESVYTTFRDREIMFHVSTKLPFTDGDAQQLQRKRHIGNDIVAIIFQEENTPFVPDMIASNFLHAYIVVQVETPGTETPSYKVSVTAREDVPTFGPPLPSPPVFQKGPEFREFLLTKLTNAENACCKSDKFAKLEDRTRAALLDNLHDELHAHTQAMLGLGPEEDKFENGGHGGFLESFKRAIRVRSHSMETMVGGQKKSHSGGIPGSLSGGISHNSMEVTKTTFSPPVVAATVKNQSRSPIKRRSGLFPRLHTGSEGQGDSRARCDSTSSTPKTPDGGHSSQEIKSETSSNPSSPEICPNKEKPFMKLKENGRAISRSSSSTSSVSSTAGEGEAMEEGDSGGSQPSTTSPFKQEVFVYSPSPSSESPSLGAAATPIIMSRSPTDAKSRNSPRSNLKFRFDKLSHASSGAGH

SEQ ID NO: 144 - protein, 711 aa, Homo sapiens
MLASLKVKKQELANSSDATLPDRPLSPPLTAPPTMKSSEFFEMLEKMQGIKLEEQKPGPQKNKDDYIPYPSIDEVVEKGGPYPQVILPQFGGYWIEDPENVGTPTSLGSSICEEEEEDNLSPNTFGYKLECKGEARAYRRHFLGKDHLNFYCTGSSLGNLILSVKCEEAEGIEYLRVILRSKLKTVHERIPLAGLSKLPSVPQIAKAFCDDAVGLRFNPVLYPKASQMIVSYDEHEVNNTFKFGVIYQKARQTLEEELFGNNEESPAFKEFLDLLGDTITLQDFKGFRGGLDVTHGQTGVESVYTTFRDREIMFHVSTKLPFTDGDAQQLQRKRHIGNDIVAIIFQEENTPFVPDMIASNFLHAYIVVQVETPGTETPSYKVSVTAREDVPTFGPPLPSPPVFQKGPEFREFLLTKLTNAENACCKSDKFAKLEDRTRAALLDNLHDELHAHTQAMLGLGPEEDKFENGGHGGFLESFKRAIRVRSHSMETMVGGQKKSHSGGIPGSLSGGISHNSMEVTKTTFSPPVVAATVKNQSRSPIKRRSGLFPRLHTGSEGQGDSRARCDSTSSTPKTPDGGHSSQEIKSETSSNPSSPEICPNKEKPFMKLKENGRAISRSSSSTSSVSSTAGEGEAMEEGDSGGSQPSTTSPFKQEVFVYSPSPSSESPSLGAAATPIIMSRSPTDAKSRNSPRSNLKFRFDKLSHASSGAGH

SEQ ID NO: 145 - DNA, 2732 bp, Homo sapiens
gactgcgggagtggagccggcgagagagtggcagcgggggctgatggaagtgcagtgggggctggagagggcaccctactgtatccagcatgctccaaggccacagctctgtgttccaggccttgctggggaccttcttcacctgggggatgacagcagctggggcagctctcgtgttcgtattctctagtggacagaggcggatcttagatggaagtcttggctttgctgcaggggtcatgttggcagcttcctattggtctcttctggccccagcagttgagatggccacgtcctctgggggcttcggtgcctttgccttcttccctgtggctgttggcttcacccttggagcggcttttgtctacttggctgacctcctgatgcctcacttgggtgcagcagaagacccccagacgaccctggcactgaacttcggctctacgttgatgaagaagaagtctgatcctgagggtcccgcgctgctcttccctgagagtgaactttccatccggatagacaagagtgagaatggtgaggcatatcagagaaagaaggcggcagccactggccttccagagggtcctgctgtccctgtgccttctcgagggaatctggcacagcccggcggcagcagctggaggaggatcgcactgctcatcttggccatcactatacacaacgttccagagggtctcgctgttggagttggatttggggctatagaaaagacggcatctgctacctttgagagtgccaggaatttggccattggaatcgggatccagaatttccccgagggcctggctgtcagccttcccttgcgaggggcaggcttctccacctggagagctttctggtatgggcagctgagcggcatggtggagcccctggccggggtctttggtgcctttgccgtggtgctggctgagcccatcctgccctacgctctggcctttgctgccggtgccatggtctacgtggtcatggacgacatcatccccgaagcccagatcagtggtaatgggaaactggcatcctgggcctccatcctgggatttgtagtgatgatgtcactggacgttggcctgggctagggctgagacgcttcggaccccgggaaaggccatacgaagaaacagcagtggttggcttctatgggacaacaagcttctttcttcacattaaaacttttttccttcctctcttcttcatctcattatcctgattgactctgattataatagaaccatttttactttgctttgagggagatttttgatttaatggggaattttaaggtgtcatggaaatacagattctttgttttggccactgaatggactctctcttcagtgggattatcaaggaacttcagatcagggaaatctccacttcgggaccttctatctgcctcccaactcctcaaggtcacctatagaagcgagctaccaaaagacgtctcctaagcattttggtggcctagtgactcagggcagagtggccagcacacctctcatccgcccctcctgctccatcactgctgagcctctccccatctagaatgttggaactggagcatcataaagatagcaagctaccttccaaggccgagccagcccagagaggagcatgtcttcctttacctccccctaaggagatactacatgggagggggacacagaaaaagggaaggaaattggctagtctggctttttttttttttttttttaaaggcaaagattgacattattgaaggaaaggggatgaggacaactgtgaactcacagtgagccctgtggaaagaagagacagacagagtgtgggtttgttcggaggcctctgctgtcaatggattccaggagcaaggccatttgtcgcgctttccaaatttcttaggcatttattttgataagtttatagccatcatgtttctaagagacttggagacaccagcaaactgctagaactcaaactcttcaattactcaaagaaggagccatttcagttaactcaagtgaatgaaagagttttggaatctgctgtgggtccttccctgttgaccatttggtaacttataatctgacaaaaactcttgagctgcaacaggccttgccagagggctcaggatgggaaaggaagaaggggataggaaaagaagaggtaattttacatttcccctttaaagtaaattttagccaactcatcattctgaaatgtccctataaagaatgagtcgaactagaccagaagccagcctactccttcttacatagcttctccaacaggggtagcaatgacctgtccacttcaaacacagataaggcctgccatcctcattggttaaaggcacacgtgagactttcagtgggctctgctgagaaggaaggcagcccaggagtcaggtatgcaggcattgcattgtcagtgtctgctctcagagtttacacattcaattgcttccaagggtgaatctcctgctctgtgaatgctatcagaccccaaaggccaaccttgggctgggtctatgtacgttcttccgaagcactgatgatcaaaattgaagacacattcagaggtttgattggttgagattaactggtgtggtggttggtgtatgtatgttttatttttatgtctttgtatgtagttctacataatgcaaattgtgctttctgatggacaagacctcataactgtgattaatatcaataaaaaggggatgttgtgga

SEQ ID NO: 146 - DNA, 2869 bp, Homo sapiens
gactgcgggagtggagccggcgagagagtggcagcgggggctgatggaagtgcagtgggggctggagagggcaccctagtgagttggcttttctctccttcggtgcctttggttgggctcgaggcccggggtcggaggccatcaggacaagagtgtgggacttggaagggcagccacctggagcttggaaggggctgtatccagcatgctccaaggccacagctctgtgttccaggccttgctggggaccttcttcacctgggggatgacagcagctggggcagctctcgtgttcgtattctctagtggacagaggcggatcttagatggaagtcttggctttgctgcaggggtcatgttggcagcttcctattggtctcttctggccccagcagttgagatggccacgtcctctgggggcttcggtgcctttgccttcttccctgtggctgttggcttcacccttggagcggcttttgtctacttggctgacctcctgatgcctcacttgggtgcagcagaagacccccagacgaccctggcactgaacttcggctctacgttgatgaagaagaagtctgatcctgagggtcccgcgctgctcttccctgagagtgaactttccatccggataggtagagctgggcttctttcagacaagagtgagaatggtgaggcatatcagagaaagaaggcggcagccactggccttccagagggtcctgctgtccctgtgccttctcgagggaatctggcacagcccggcggcagcagctggaggaggatcgcactgctcatcttggccatcactatacacaacgttccagagggtctcgctgttggagttggatttggggctatagaaaagacggcatctgctacctttgagagtgccaggaatttggccattggaatcgggatccagaatttccccgagggcctggctgtcagccttcccttgcgaggggcaggcttctccacctggagagctttctggtatgggcagctgagcggcatggtggagcccctggccggggtctttggtgcctttgccgtggtgctggctgagcccatcctgccctacgctctggcctttgctgccggtgccatggtctacgtggtcatggacgacatcatccccgaagcccagatcagtggtaatgggaaactggcatcctgggcctccatcctgggatttgtagtgatgatgtcactggacgttggcctgggctagggctgagacgcttcggaccccgggaaaggccatacgaagaaacagcagtggttggcttctatgggacaacaagcttctttcttcacattaaaacttttttccttcctctcttcttcatctcattatcctgattgactctgattataatagaaccatttttactttgctttgagggagatttttgatttaatggggaattttaaggtgtcatggaaatacagattctttgttttggccactgaatggactctctcttcagtgggattatcaaggaacttcagatcagggaaatctccacttcgggaccttctatctgcctcccaactcctcaaggtcacctatagaagcgagctaccaaaagacgtctcctaagcattttggtggcctagtgactcagggcagagtggccagcacacctctcatccgcccctcctgctccatcactgctgagcctctccccatctagaatgttggaactggagcatcataaagatagcaagctaccttccaaggccgagccagcccagagaggagcatgtcttcctttacctccccctaaggagatactacatgggagggggacacagaaaaagggaaggaaattggctagtctggctttttttttttttttttttaaaggcaaagattgacattattgaaggaaaggggatgaggacaactgtgaactcacagtgagccctgtggaaagaagagacagacagagtgtgggtttgttcggaggcctctgctgtcaatggattccaggagcaaggccatttgtcgcgctttccaaatttcttaggcatttattttgataagtttatagccatcatgtttctaagagacttggagacaccagcaaactgctagaactcaaactcttcaattactcaaagaaggagccatttcagttaactcaagtgaatgaaagagttttggaatctgctgtgggtccttccctgttgaccatttggtaacttataatctgacaaaaactcttgagctgcaacaggccttgccagagggctcaggatgggaaaggaagaaggggataggaaaagaagaggtaattttacatttcccctttaaagtaaattttagccaactcatcattctgaaatgtccctataaagaatgagtcgaactagaccagaagccagcctactccttcttacatagcttctccaacaggggtagcaatgacctgtccacttcaaacacagataaggcctgccatcctcattggttaaaggcacacgtgagactttcagtgggctctgctgagaaggaaggcagcccaggagtcaggtatgcaggcattgcattgtcagtgtctgctctcagagtttacacattcaattgcttccaagggtgaatctcctgctctgtgaatgctatcagaccccaaaggccaaccttgggctgggtctatgtacgttcttccgaagcactgatgatcaaaattgaagacacattcagaggtttgattggttgagattaactggtgtggtggttggtgtatgtatgttttatttttatgtctttgtatgtagttctacataatgcaaattgtgctttctgatggacaagacctcataactgtgattaatatcaataaaaaggggatgttgtgga

SEQ ID NO: 147 - protein, 335 aa, Homo sapiens
MLQGHSSVFQALLGTFFTWGMTAAGAALVFVFSSGQRRILDGSLGFAAGVMLAASYWSLLAPAVEMATSSGGFGAFAFFPVAVGFTLGAAFVYLADLLMPHLGAAEDPQTTLALNFGSTLMKKKSDPEGPALLFPESELSIRIDKSENGEAYQRKKAAATGLPEGPAVPVPSRGNLAQPGGSSWRRIALLILAITIHNVPEGLAVGVGFGAIEKTASATFESARNLAIGIGIQNFPEGLAVSLPLRGAGFSTWRAFWYGQLSGMVEPLAGVFGAFAVVLAEPILPYALAFAAGAMVYVVMDDIIPEAQISGNGKLASWASILGFVVMMSLDVGLG

SEQ ID NO: 148 - protein, 342 aa, Homo sapiens
MLQGHSSVFQALLGTFFTWGMTAAGAALVFVFSSGQRRILDGSLGFAAGVMLAASYWSLLAPAVEMATSSGGFGAFAFFPVAVGFTLGAAFVYLADLLMPHLGAAEDPQTTLALNFGSTLMKKKSDPEGPALLFPESELSIRIGRAGLLSDKSENGEAYQRKKAAATGLPEGPAVPVPSRGNLAQPGGSSWRRIALLILAITIHNVPEGLAVGVGFGAIEKTASATFESARNLAIGIGIQNFPEGLAVSLPLRGAGFSTWRAFWYGQLSGMVEPLAGVFGAFAVVLAEPILPYALAFAAGAMVYVVMDDIIPEAQISGNGKLASWASILGFVVMMSLDVGLG

SEQ ID NO: 149 - DNA, 4510 bp, Homo sapiens
gctgaggccaggagggcgcactggggattggaggcgagggaagtgcagggcgcatcccaggcggcagggctcccagcatcggcagtcgccatcaccgccagaccgcagagacaggttcggatccgcggtcctcttgcctctttccaggcctcgatgagtgttaaatcgccatttaatgtgatgtcaagaaataatttggaagcacctccttgtaagatgacagagccatttaattttgagaaaaatgaaaacaagcttccaccacatgagtctttaagaagtcctggaacacttcctaaccaccctaatttcaggctgaaaagctcagagaatggaaataaaaagaacaattttttgctttgtgagcaaaccaaacaatatttggctagtcaggaagacaattcagtttcttcaaacccgaatggcatcaacggagaagtagttggctccaaaggagacaggaaaaaattgccagcaggaaactcagtgtcaccaccaagtgctgaaagtaattcaccacccaaagaagtgaatattaagcctggaaataatgtacgtcctgcaaaatcaaaaaaactaaacaagttggtcgagaattccttgtccataagtaatccagggctcttcacctccttaggacctcctcttcggtccacaacttgccatcgctgtggcctatttggatcgctgaggtgctctcagtgcaagcagacctactattgctccacagcatgtcaaagaagagactggtctgcacacagcatcgtgtgcaggcctgttcagccaaatttccacaaacttgaaaataaatcatctattgaaacaaaggatgtggaggtaaacaataagagtgactgtccacttggagttactaaggaaatagccatttgggctgagagaataatgttttctgatttgagaagtctacaactcaagaaaaccatggaaataaagggtacggttaccgaattcaaacacccaggggacttctacgtgcagttatattcttcagaagttttagaatacatgaaccaactctctgccagcttaaaagaaacatatgcaaatgtgcatgaaaaagactatattcctgttaagggggaagtttgtattgccaagtacactgttgatcagacctggaacagagcaatcatacaaaacgttgatgtgcagcaaaagaaggcacatgtcttatatattgattatggaaatgaagaaataattccattaaacagaatttaccacctcaacaggaacattgacttgtttcctccttgtgccataaagtgctttgtagccaatgttatcccagcagaagggaattggagcagtgattgtatcaaagctactaaaccactgttaatggagcagtactgctccataaagattgtcgacatcttggaagaggaagtggttacctttgctgtagaagttgagctgccaaattcaggaaaacttttagaccatgtgcttatagaaatgggatatggcttgaaacccagtggacaagattctaagaaggaaaatgcagatcaaagtgatcctgaagatgttggaaaaatgacaactgaaaacaacattgtcgtagacaaaagtgacctaatcccaaaagtgttaactttgaatgtaggtgatgagttttgtggtgtggttgcccacattcaaacaccagaagacttcttttgtcaacaactgcaaagtggccgaaagcttgctgaacttcaggcatcccttagcaagtactgtgatcagttgcctccacgctctgatttttatccagccattggtgatatatgttgtgctcagttctcagaggatgatcagtggtaccgtgcctctgttttggcttacgcttctgaagaatctgtactggtcggatatgtagattatggaaactttgaaatccttagtttgatgagactttgtcccataatcccaaagttgttggaattgccaatgcaagctataaagtgtgtactagcaggagtaaagccatcattaggaatttggactccagaagctatttgtctcatgaaaaaacttgtacagaacaaaataatcacagtgaaagtggtggacaagttggaaaacagttccctggtggagcttattgataaatccgagacgcctcatgtcagtgttagcaaagttctcctagatgcaggctttgctgtgggagaacagagtatggtgacagataaacccagtgacgtgaaagaaaccagtgttcccttgggtgtggaaggaaaagtaaatccattggagtggacatgggttgaacttggtgttgaccaaacagtagatgttgtggtctgtgtgatatatagtcctggagaattttattgccatgtgcttaaagaggatgctttaaagaaactcaatgatttgaacaagtcattagcagaacactgccagcagaagttacctaatggtttcaaggcagagataggacaaccttgttgtgctttttttgcaggtgatggtagttggtatcgtgctttagtcaaggaaatcttaccaaatggacatgttaaagtacattttgtggattatggaaacatcgaagaagttactgcagatgaactccgaatgatatcatcaacatttttaaaccttccctttcagggaatacggtgccagttagcagatatacagtctagaaacaaacattggtctgaagaagccataacaagattccagatgtgtgttgctgggataaaattgcaagccagagtggttgaagtcactgaaaatgggataggagttgaactcaccgatctctccacttgttatcccagaataattagtgatgttctgattgatgaacatctggttttaaaatctgcttcaccacataaagacttaccaaatgacagacttgttaataaacatgagcttcaagttcatgtacagggacttcaagctacctcttcagctgagcaatggaagacgatagaattgccagtggataaaactatacaagcaaatgtattagaaatcataagcccaaacttgttttatgctctaccaaaagggatgccagaaaatcaggaaaagctgtgcatgttgacagctgaattattagaatactgcaatgctccgaaaagtcgaccaccctatagaccaagaattggagacgcatgctgtgccaaatacacaagtgatgatttttggtatcgtgcagttgttctggggacatcagacactgatgtggaagtgctctatgcagactatggaaacattgaaaccctgcctctttgcagagtgcaaccaatcacctctagccacctggcgcttcctttccaaattattagatgttcacttgaaggattaatggaattgaatggaagctcttctcaattaataataatgctattaaaaaatttcatgttgaatcagaatgtaatgctttctgtgaaaggaattacaaagaatgtccatacagtgtcagttgagaaatgttctgagaatgggactgtcgatgtagctgataagctagtgacatttggtctggcaaaaaacatcacacctcaaaggcagagtgctttaaatacagaaaagatgtataggatgaattgctgctgcacagagttacagaaacaagttgaaaaacatgaacatattcttctcttcctcttaaacaattcaaccaatcaaaataaatttattgaaatgaaaaaactgttaaaaaaaacagcatctcttggaggtaaacccttatgagacaggaaacagcaaaggctagctttaggagagaaagtacagcacctggtgtttttatttatgagaaccttttctttgtccactttctctgtaatgaccttctatccctccgtttttgcctgcctgccattctcctattaggttggtggtttttattttcctctaagttccttccaccaaataaatattacgtaaaaaattcataccaaatcaatgagaatactggcaaggaatacatagggactttctgctatatatgtaactttttattacttaaaggtaccgaaggaaggccaggtgcagtggctcacgcccagcactttgggaggctgaggtgggaggatcccttgaggccaggagttcaaggttacagtgagctatgatagtgccactgcactccagcctgggtgacagattttgtcttaaaaaaaaaaaaaaaaaagttgatatgagttttattttctgtccgtttgaaatattttgtaatattccctgcattctctgtcgtctgcctcttccacataatgtcctttgctttcatgtttgttatcttctttttctgttcactcagaggtcatcaatttctttctctccgtccttaattggattatttttcttttggcctttgggcacagagtctgacctctggaccactctaactggagaaggaactttatgttccctctcctgctgtgtccacaaccttagaaatctgtagctagatttttgttgttatagatagaatttactgtttctgaaacccaaatacagttatcagtttaaggtt

SEQ ID NO: 150 - protein, 1189 aa, Homo sapiens
MSVKSPFNVMSRNNLEAPPCKMTEPFNFEKNENKLPPHESLRSPGTLPNHPNFRLKSSENGNKKNNFLLCEQTKQYLASQEDNSVSSNPNGINGEVVGSKGDRKKLPAGNSVSPPSAESNSPPKEVNIKPGNNVRPAKSKKLNKLVENSLSISNPGLFTSLGPPLRSTTCHRCGLFGSLRCSQCKQTYYCSTACQRRDWSAHSIVCRPVQPNFHKLENKSSIETKDVEVNNKSDCPLGVTKEIAIWAERIMFSDLRSLQLKKTMEIKGTVTEFKHPGDFYVQLYSSEVLEYMNQLSASLKETYANVHEKDYIPVKGEVCIAKYTVDQTWNRAIIQNVDVQQKKAHVLYIDYGNEEIIPLNRIYHLNRNIDLFPPCAIKCFVANVIPAEGNWSSDCIKATKPLLMEQYCSIKIVDILEEEVVTFAVEVELPNSGKLLDHVLIEMGYGLKPSGQDSKKENADQSDPEDVGKMTTENNIVVDKSDLIPKVLTLNVGDEFCGVVAHIQTPEDFFCQQLQSGRKLAELQASLSKYCDQLPPRSDFYPAIGDICCAQFSEDDQWYRASVLAYASEESVLVGYVDYGNFEILSLMRLCPIIPKLLELPMQAIKCVLAGVKPSLGIWTPEAICLMKKLVQNKIITVKVVDKLENSSLVELIDKSETPHVSVSKVLLDAGFAVGEQSMVTDKPSDVKETSVPLGVEGKVNPLEWTWVELGVDQTVDVVVCVIYSPGEFYCHVLKEDALKKLNDLNKSLAEHCQQKLPNGFKAEIGQPCCAFFAGDGSWYRALVKEILPNGHVKVHFVDYGNIEEVTADELRMISSTFLNLPFQGIRCQLADIQSRNKHWSEEAITRFQMCVAGIKLQARVVEVTENGIGVELTDLSTCYPRIISDVLIDEHLVLKSASPHKDLPNDRLVNKHELQVHVQGLQATSSAEQWKTIELPVDKTIQANVLEIISPNLFYALPKGMPENQEKLCMLTAELLEYCNAPKSRPPYRPRIGDACCAKYTSDDFWYRAVVLGTSDTDVEVLYADYGNIETLPLCRVQPITSSHLALPFQIIRCSLEGLMELNGSSSQLIIMLLKNFMLNQNVMLSVKGITKNVHTVSVEKCSENGTVDVADKLVTFGLAKNITPQRQSALNTEKMYRMNCCCTELQKQVEKHEHILLFLLNNSTNQNKFIEMKKLLKKTASLGGKPL

SEQ ID NO: 151 - DNA, 4216 bp, Homo sapiens
agtttctcttctcggccacctcctgcatagagggtaccattctgcgctgctgcaagttacggaatgaaaaattagaacaacagaaacatggaaaacatgttccttcagtcgtcaatgctgacctgcattttcctgctaatatctggttcctgtgagttatgcgccgaagaaaatttttctagaagctatccttgtgatgagaaaaagcaaaatgactcagttattgcagagtgcagcaatcgtcgactacaggaagttccccaaacggtgggcaaatatgtgacagaactagacctgtctgataatttcatcacacacataacgaatgaatcatttcaagggctgcaaaatctcactaaaataaatctaaaccacaaccccaatgtacagcaccagaacggaaatcccggtatacaatcaaatggcttgaatatcacagacggggcattcctcaacctaaaaaacctaagggagttactgcttgaagacaaccagttaccccaaataccctctggtttgccagagtctttgacagaacttagtctaattcaaaacaatatatacaacataactaaagagggcatttcaagacttataaacttgaaaaatctctatttggcctggaactgctattttaacaaagtttgcgagaaaactaacatagaagatggagtatttgaaacgctgacaaatttggagttgctatcactatctttcaattctctttcacacgtgccacccaaactgccaagctccctacgcaaactttttctgagcaacacccagatcaaatacattagtgaagaagatttcaagggattgataaatttaacattactagatttaagcgggaactgtccgaggtgcttcaatgccccatttccatgcgtgccttgtgatggtggtgcttcaattaatatagatcgttttgcttttcaaaacttgacccaacttcgatacctaaacctctctagcacttccctcaggaagattaatgctgcctggtttaaaaatatgcctcatctgaaggtgctggatcttgaattcaactatttagtgggagaaatagcctctggggcatttttaacgatgctgccccgcttagaaatacttgacttgtcttttaactatataaaggggagttatccacagcatattaatatttccagaaacttctctaaacttttgtctctacgggcattgcatttaagaggttatgtgttccaggaactcagagaagatgatttccagcccctgatgcagcttccaaacttatcgactatcaacttgggtattaattttattaagcaaatcgatttcaaacttttccaaaatttctccaatctggaaattatttacttgtcagaaaacagaatatcaccgttggtaaaagatacccggcagagttatgcaaatagttcctcttttcaacgtcatatccggaaacgacgctcaacagattttgagtttgacccacattcgaacttttatcatttcacccgtcctttaataaagccacaatgtgctgcttatggaaaagccttagatttaagcctcaacagtattttcttcattgggccaaaccaatttgaaaatcttcctgacattgcctgtttaaatctgtctgcaaatagcaatgctcaagtgttaagtggaactgaattttcagccattcctcatgtcaaatatttggatttgacaaacaatagactagactttgataatgctagtgctcttactgaattgtccgacttggaagttctagatctcagctataattcacactatttcagaatagcaggcgtaacacatcatctagaatttattcaaaatttcacaaatctaaaagttttaaacttgagccacaacaacatttatactttaacagataagtataacctggaaagcaagtccctggtagaattagttttcagtggcaatcgccttgacattttgtggaatgatgatgacaacaggtatatctccattttcaaaggtctcaagaatctgacacgtctggatttatcccttaataggctgaagcacatcccaaatgaagcattccttaatttgccagcgagtctcactgaactacatataaatgataatatgttaaagttttttaactggacattactccagcagtttcctcgtctcgagttgcttgacttacgtggaaacaaactactctttttaactgatagcctatctgactttacatcttcccttcggacactgctgctgagtcataacaggatttcccacctaccctctggctttctttctgaagtcagtagtctgaagcacctcgatttaagttccaatctgctaaaaacaatcaacaaatccgcacttgaaactaagaccaccaccaaattatctatgttggaactacacggaaacccctttgaatgcacctgtgacattggagatttccgaagatggatggatgaacatctgaatgtcaaaattcccagactggtagatgtcatttgtgccagtcctggggatcaaagagggaagagtattgtgagtctggagctaacaacttgtgtttcagatgtcactgcagtgatattatttttcttcacgttctttatcaccaccatggttatgttggctgccctggctcaccatttgttttactgggatgtttggtttatatataatgtgtgtttagctaaggtaaaaggctacaggtctctttccacatcccaaactttctatgatgcttacatttcttatgacaccaaagatgcctctgttactgactgggtgataaatgagctgcgctaccaccttgaagagagccgagacaaaaacgttctcctttgtctagaggagagggattgggacccgggattggccatcatcgacaacctcatgcagagcatcaaccaaagcaagaaaacagtatttgttttaaccaaaaaatatgcaaaaagctggaactttaaaacagctttttacttggctttgcagaggctaatggatgagaacatggatgtgattatatttatcctgctggagccagtgttacagcattctcagtatttgaggctacggcagcggatctgtaagagctccatcctccagtggcctgacaacccgaaggcagaaggcttgttttggcaaactctgagaaatgtggtcttgactgaaaatgattcacggtataacaatatgtatgtcgattccattaagcaatactaactgacgttaagtcatgatttcgcgccataataaagatgcaaaggaatgacatttctgtattagttatctattgctatgtaacaaattatcccaaaacttagtggtttaaaacaacacatttgctggcccacagtttttgagggtcaggagtccaggcccagcataactgggtcctctgctcagggtgtctcagaggctgcaatgtaggtgttcaccagagacataggcatcactggggtcacactcatgtggttgttttctggattcaattcctcctgggctattggccaaaggctatactcatgtaagccatgcgagcctctcccacaaggcagcttgcttcatcagagctagcaaaaaagagaggttgctagcaagatgaagtcacaatcttttgtaatcgaatcaaaaaagtgatatctcatcactttggccatattctatttgttagaagtaaaccacaggtcccaccagctccatgggagtgaccacctcagtccagggaaaacagctgaagaccaagatggtgagctctgattgcttcagttggtcatcaactattttcccttgactgctgtcctgggatggcctgctatcttgatgatagattgtgaatatcaggaggcagggatcactgtggaccatcttagcagttgacctaacacatcttcttttcaatatctaagaacttttgccactgtgactaatggtcctaatattaagctgttgtttatatttatcatatatctatggctacatggttatattatgctgtggttgcgttcggttttatttacagttgcttttacaaatatttgctgtaacatttgacttctaaggtttagatgccatttaagaactgagatggatagcttttaaagcatcttttacttcttaccattttttaaaagtatgcagctaaattcgaagcttttggtctatattgttaattgccattgctgtaaatcttaaaatgaatgaataaaaatgtttcattttacaa

SEQ ID NO: 152 - DNA, 4353 bp, Homo sapiens
agtttctcttctcggccacctcctgcatagagggtaccattctgcgctgctgcaagttacggaatgaaaaattagaacaacagaaacatggttctcttgacacttcagtgttagggaacatcagcaagacccatcccaggagaccttgaaggaagcctttgaaagggagaatgaaggagtcatctttgcaaaatagctcctgcagcctgggaaaggagactaaaaaggaaaacatgttccttcagtcgtcaatgctgacctgcattttcctgctaatatctggttcctgtgagttatgcgccgaagaaaatttttctagaagctatccttgtgatgagaaaaagcaaaatgactcagttattgcagagtgcagcaatcgtcgactacaggaagttccccaaacggtgggcaaatatgtgacagaactagacctgtctgataatttcatcacacacataacgaatgaatcatttcaagggctgcaaaatctcactaaaataaatctaaaccacaaccccaatgtacagcaccagaacggaaatcccggtatacaatcaaatggcttgaatatcacagacggggcattcctcaacctaaaaaacctaagggagttactgcttgaagacaaccagttaccccaaataccctctggtttgccagagtctttgacagaacttagtctaattcaaaacaatatatacaacataactaaagagggcatttcaagacttataaacttgaaaaatctctatttggcctggaactgctattttaacaaagtttgcgagaaaactaacatagaagatggagtatttgaaacgctgacaaatttggagttgctatcactatctttcaattctctttcacacgtgccacccaaactgccaagctccctacgcaaactttttctgagcaacacccagatcaaatacattagtgaagaagatttcaagggattgataaatttaacattactagatttaagcgggaactgtccgaggtgcttcaatgccccatttccatgcgtgccttgtgatggtggtgcttcaattaatatagatcgttttgcttttcaaaacttgacccaacttcgatacctaaacctctctagcacttccctcaggaagattaatgctgcctggtttaaaaatatgcctcatctgaaggtgctggatcttgaattcaactatttagtgggagaaatagcctctggggcatttttaacgatgctgccccgcttagaaatacttgacttgtcttttaactatataaaggggagttatccacagcatattaatatttccagaaacttctctaaacttttgtctctacgggcattgcatttaagaggttatgtgttccaggaactcagagaagatgatttccagcccctgatgcagcttccaaacttatcgactatcaacttgggtattaattttattaagcaaatcgatttcaaacttttccaaaatttctccaatctggaaattatttacttgtcagaaaacagaatatcaccgttggtaaaagatacccggcagagttatgcaaatagttcctcttttcaacgtcatatccggaaacgacgctcaacagattttgagtttgacccacattcgaacttttatcatttcacccgtcctttaataaagccacaatgtgctgcttatggaaaagccttagatttaagcctcaacagtattttcttcattgggccaaaccaatttgaaaatcttcctgacattgcctgtttaaatctgtctgcaaatagcaatgctcaagtgttaagtggaactgaattttcagccattcctcatgtcaaatatttggatttgacaaacaatagactagactttgataatgctagtgctcttactgaattgtccgacttggaagttctagatctcagctataattcacactatttcagaatagcaggcgtaacacatcatctagaatttattcaaaatttcacaaatctaaaagttttaaacttgagccacaacaacatttatactttaacagataagtataacctggaaagcaagtccctggtagaattagttttcagtggcaatcgccttgacattttgtggaatgatgatgacaacaggtatatctccattttcaaaggtctcaagaatctgacacgtctggatttatcccttaataggctgaagcacatcccaaatgaagcattccttaatttgccagcgagtctcactgaactacatataaatgataatatgttaaagttttttaactggacattactccagcagtttcctcgtctcgagttgcttgacttacgtggaaacaaactactctttttaactgatagcctatctgactttacatcttcccttcggacactgctgctgagtcataacaggatttcccacctaccctctggctttctttctgaagtcagtagtctgaagcacctcgatttaagttccaatctgctaaaaacaatcaacaaatccgcacttgaaactaagaccaccaccaaattatctatgttggaactacacggaaacccctttgaatgcacctgtgacattggagatttccgaagatggatggatgaacatctgaatgtcaaaattcccagactggtagatgtcatttgtgccagtcctggggatcaaagagggaagagtattgtgagtctggagctaacaacttgtgtttcagatgtcactgcagtgatattatttttcttcacgttctttatcaccaccatggttatgttggctgccctggctcaccatttgttttactgggatgtttggtttatatataatgtgtgtttagctaaggtaaaaggctacaggtctctttccacatcccaaactttctatgatgcttacatttcttatgacaccaaagatgcctctgttactgactgggtgataaatgagctgcgctaccaccttgaagagagccgagacaaaaacgttctcctttgtctagaggagagggattgggacccgggattggccatcatcgacaacctcatgcagagcatcaaccaaagcaagaaaacagtatttgttttaaccaaaaaatatgcaaaaagctggaactttaaaacagctttttacttggctttgcagaggctaatggatgagaacatggatgtgattatatttatcctgctggagccagtgttacagcattctcagtatttgaggctacggcagcggatctgtaagagctccatcctccagtggcctgacaacccgaaggcagaaggcttgttttggcaaactctgagaaatgtggtcttgactgaaaatgattcacggtataacaatatgtatgtcgattccattaagcaatactaactgacgttaagtcatgatttcgcgccataataaagatgcaaaggaatgacatttctgtattagttatctattgctatgtaacaaattatcccaaaacttagtggtttaaaacaacacatttgctggcccacagtttttgagggtcaggagtccaggcccagcataactgggtcctctgctcagggtgtctcagaggctgcaatgtaggtgttcaccagagacataggcatcactggggtcacactcatgtggttgttttctggattcaattcctcctgggctattggccaaaggctatactcatgtaagccatgcgagcctctcccacaaggcagcttgcttcatcagagctagcaaaaaagagaggttgctagcaagatgaagtcacaatcttttgtaatcgaatcaaaaaagtgatatctcatcactttggccatattctatttgttagaagtaaaccacaggtcccaccagctccatgggagtgaccacctcagtccagggaaaacagctgaagaccaagatggtgagctctgattgcttcagttggtcatcaactattttcccttgactgctgtcctgggatggcctgctatcttgatgatagattgtgaatatcaggaggcagggatcactgtggaccatcttagcagttgacctaacacatcttcttttcaatatctaagaacttttgccactgtgactaatggtcctaatattaagctgttgtttatatttatcatatatctatggctacatggttatattatgctgtggttgcgttcggttttatttacagttgcttttacaaatatttgctgtaacatttgacttctaaggtttagatgccatttaagaactgagatggatagcttttaaagcatcttttacttcttaccattttttaaaagtatgcagctaaattcgaagcttttggtctatattgttaattgccattgctgtaaatcttaaaatgaatgaataaaaatgtttcattttacaa

SEQ ID NO: 153 - protein, 1041 aa, Homo sapiens
MENMFLQSSMLTCIFLLISGSCELCAEENFSRSYPCDEKKQNDSVIAECSNRRLQEVPQTVGKYVTELDLSDNFITHITNESFQGLQNLTKINLNHNPNVQHQNGNPGIQSNGLNITDGAFLNLKNLRELLLEDNQLPQIPSGLPESLTELSLIQNNIYNITKEGISRLINLKNLYLAWNCYFNKVCEKTNIEDGVFETLTNLELLSLSFNSLSHVPPKLPSSLRKLFLSNTQIKYISEEDFKGLINLTLLDLSGNCPRCFNAPFPCVPCDGGASINIDRFAFQNLTQLRYLNLSSTSLRKINAAWFKNMPHLKVLDLEFNYLVGEIASGAFLTMLPRLEILDLSFNYIKGSYPQHINISRNFSKLLSLRALHLRGYVFQELREDDFQPLMQLPNLSTINLGINFIKQIDFKLFQNFSNLEIIYLSENRISPLVKDTRQSYANSSSFQRHIRKRRSTDFEFDPHSNFYHFTRPLIKPQCAAYGKALDLSLNSIFFIGPNQFENLPDIACLNLSANSNAQVLSGTEFSAIPHVKYLDLTNNRLDFDNASALTELSDLEVLDLSYNSHYFRIAGVTHHLEFIQNFTNLKVLNLSHNNIYTLTDKYNLESKSLVELVFSGNRLDILWNDDDNRYISIFKGLKNLTRLDLSLNRLKHIPNEAFLNLPASLTELHINDNMLKFFNWTLLQQFPRLELLDLRGNKLLFLTDSLSDFTSSLRTLLLSHNRISHLPSGFLSEVSSLKHLDLSSNLLKTINKSALETKTTTKLSMLELHGNPFECTCDIGDFRRWMDEHLNVKIPRLVDVICASPGDQRGKSIVSLELTTCVSDVTAVILFFFTFFITTMVMLAALAHHLFYWDVWFIYNVCLAKVKGYRSLSTSQTFYDAYISYDTKDASVTDWVINELRYHLEESRDKNVLLCLEERDWDPGLAIIDNLMQSINQSKKTVFVLTKKYAKSWNFKTAFYLALQRLMDENMDVIIFILLEPVLQHSQYLRLRQRICKSSILQWPDNPKAEGLFWQTLRNVVLTENDSRYNNMYVDSIKQY

SEQ ID NO: 154 - protein, 1059 aa, Homo sapiens
MKESSLQNSSCSLGKETKKENMFLQSSMLTCIFLLISGSCELCAEENFSRSYPCDEKKQNDSVIAECSNRRLQEVPQTVGKYVTELDLSDNFITHITNESFQGLQNLTKINLNHNPNVQHQNGNPGIQSNGLNITDGAFLNLKNLRELLLEDNQLPQIPSGLPESLTELSLIQNNIYNITKEGISRLINLKNLYLAWNCYFNKVCEKTNIEDGVFETLTNLELLSLSFNSLSHVPPKLPSSLRKLFLSNTQIKYISEEDFKGLINLTLLDLSGNCPRCFNAPFPCVPCDGGASINIDRFAFQNLTQLRYLNLSSTSLRKINAAWFKNMPHLKVLDLEFNYLVGEIASGAFLTMLPRLEILDLSFNYIKGSYPQHINISRNFSKLLSLRALHLRGYVFQELREDDFQPLMQLPNLSTINLGINFIKQIDFKLFQNFSNLEIIYLSENRISPLVKDTRQSYANSSSFQRHIRKRRSTDFEFDPHSNFYHFTRPLIKPQCAAYGKALDLSLNSIFFIGPNQFENLPDIACLNLSANSNAQVLSGTEFSAIPHVKYLDLTNNRLDFDNASALTELSDLEVLDLSYNSHYFRIAGVTHHLEFIQNFTNLKVLNLSHNNIYTLTDKYNLESKSLVELVFSGNRLDILWNDDDNRYISIFKGLKNLTRLDLSLNRLKHIPNEAFLNLPASLTELHINDNMLKFFNWTLLQQFPRLELLDLRGNKLLFLTDSLSDFTSSLRTLLLSHNRISHLPSGFLSEVSSLKHLDLSSNLLKTINKSALETKTTTKLSMLELHGNPFECTCDIGDFRRWMDEHLNVKIPRLVDVICASPGDQRGKSIVSLELTTCVSDVTAVILFFFTFFITTMVMLAALAHHLFYWDVWFIYNVCLAKVKGYRSLSTSQTFYDAYISYDTKDASVTDWVINELRYHLEESRDKNVLLCLEERDWDPGLAIIDNLMQSINQSKKTVFVLTKKYAKSWNFKTAFYLALQRLMDENMDVIIFILLEPVLQHSQYLRLRQRICKSSILQWPDNPKAEGLFWQTLRNVVLTENDSRYNNMYVDSIKQY

SEQ ID NO: 155 - DNA, 5799 bp, Homo sapiens
agtgccggctgccgatgaccgattcacgctcccggtactggggccccctctgcccagccacccctacccagagcacccgggctgcgcggccccgccgagggtgcgggctttgttcgcattgtctgcgcgcacctgagcgcggccttcctggcacggcggcgtcgggggaagagcgcacctggcgcgcgcctccctcgtggccactcgcggtccgtcccgggcgagctggcggggttttgggaggggtgcggtcagcagttatatcaacatgccccctttcctgttgctggaagccgtctgtgttttcctgttttccagagtgcccccatctctccctctccaggaagtccatgtaagcaaagaaaccatcgggaagatttcagctgccagcaaaatgatgtggtgctcggctgcagtggacatcatgtttctgttagatgggtctaacagcgtcgggaaagggagctttgaaaggtccaagcactttgccatcacagtctgtgacggtctggacatcagccccgagagggtcagagtgggagcattccagttcagttccactcctcatctggaattccccttggattcattttcaacccaacaggaagtgaaggcaagaatcaagaggatggttttcaaaggagggcgcacggagacggaacttgctctgaaataccttctgcacagagggttgcctggaggcagaaatgcttctgtgccccagatcctcatcatcgtcactgatgggaagtcccagggggatgtggcactgccatccaagcagctgaaggaaaggggtgtcactgtgtttgctgtgggggtcaggtttcccaggtgggaggagctgcatgcactggccagcgagcctagagggcagcacgtgctgttggctgagcaggtggaggatgccaccaacggcctcttcagcaccctcagcagctcggccatctgctccagcgccacgccagactgcagggtcgaggctcacccctgtgagcacaggacgctggagatggtccgggagttcgctggcaatgccccatgctggagaggatcgcggcggacccttgcggtgctggctgcacactgtcccttctacagctggaagagagtgttcctaacccaccctgccacctgctacaggaccacctgcccaggcccctgtgactcgcagccctgccagaatggaggcacatgtgttccagaaggactggacggctaccagtgcctctgcccgctggcctttggaggggaggctaactgtgccctgaagctgagcctggaatgcagggtcgacctcctcttcctgctggacagctctgcgggcaccactctggacggcttcctgcgggccaaagtcttcgtgaagcggtttgtgcgggccgtgctgagcgaggactctcgggcccgagtgggtgtggccacatacagcagggagctgctggtggcggtgcctgtgggggagtaccaggatgtgcctgacctggtctggagcctcgatggcattcccttccgtggtggccccaccctgacgggcagtgccttgcggcaggcggcagagcgtggcttcgggagcgccaccaggacaggccaggaccggccacgtagagtggtggttttgctcactgagtcacactccgaggatgaggttgcgggcccagcgcgtcacgcaagggcgcgagagctgctcctgctgggtgtaggcagtgaggccgtgcgggcagagctggaggagatcacaggcagcccaaagcatgtgatggtctactcggatcctcaggatctgttcaaccaaatccctgagctgcaggggaagctgtgcagccggcagcggccagggtgccggacacaagccctggacctcgtcttcatgttggacacctctgcctcagtagggcccgagaattttgctcagatgcagagctttgtgagaagctgtgccctccagtttgaggtgaaccctgacgtgacacaggtcggcctggtggtgtatggcagccaggtgcagactgccttcgggctggacaccaaacccacccgggctgcgatgctgcgggccattagccaggccccctacctaggtggggtgggctcagccggcaccgccctgctgcacatctatgacaaagtgatgaccgtccagaggggtgcccggcctggtgtccccaaagctgtggtggtgctcacaggcgggagaggcgcagaggatgcagccgttcctgcccagaagctgaggaacaatggcatctctgtcttggtcgtgggcgtggggcctgtcctaagtgagggtctgcggaggcttgcaggtccccgggattccctgatccacgtggcagcttacgccgacctgcggtaccaccaggacgtgctcattgagtggctgtgtggagaagccaagcagccagtcaacctctgcaaacccagcccgtgcatgaatgagggcagctgcgtcctgcagaatgggagctaccgctgcaagtgtcgggatggctgggagggcccccactgcgagaaccgattcttgagacgcccctgaggcacatggctcccgtgcaggagggcagcagccgtacccctcccagcaactacagagaaggcctgggcactgaaatggtgcctaccttctggaatgtctgtgccccaggtccttagaatgtctgcttcccgccgtggccaggaccactattctcactgagggaggaggatgtcccaactgcagccatgctgcttagagacaagaaagcagctgatgtcacccacaaacgatgttgttgaaaagttttgatgtgtaagtaaatacccactttctgtacctgctgtgccttgttgaggctatgtcatctgccacctttcccttgaggataaacaaggggtcctgaagacttaaatttagcggcctgacgttcctttgcacacaatcaatgctcgccagaatgttgttgacacagtaatgcccagcagaggcctttactagagcatcctttggacggcgaaggccacggcctttcaagatggaaagcagcagcttttccacttccccagagacattctggatgcatttgcattgagtctgaaagggggcttgagggacgtttgtgacttctggcgactgccttttgtgtgtggaagagacttggaaaggtctcagactgaaatgtgaccaattaaccagcttgtttgatgatgggggaggggctgagtgtgcaatgggcccaggtctggaggggccacgtaaaatcgttctgagtcgtgagcagtgtccacctgaagggtcttcctttcaaaagaggctgcggccagagactgtggctcatgcctgtaatcccagcactttggaggctgaggcaggtggatcacccgaggtcaggagtttgagaccagcctggccaacgtggtgaaagtttgtctttactaaaaatacaaaaggtagccgggggtggtggtggatgcctataatcccagctactcgggaggctgagacaggagaatggcttgaacctgggaggcggaagttacagtgagccgagatctcaccactgcactccagcctgggcaacaagagtaaaaatctgtctcaaaaagaaaaaaatgtacttaggaggggttaattgtggcgtgtttatggaattctttccttattctccttttagtggggcaaagagaagtaagattcttaaactcaaaaatataggataaagaaacttacagagattttgctttttaaagcattgatcttacgctgtctaggttttaattttgttttgctttgcttttctacacagtttttaaagaaatatttcaagaaatgttggttatttattaaacagggatatttgtacctatgtggcaaagaggcatatttggaatattctctggcaaactagatacttacttccctatcgctgcagtatttaggaattacttcttctccttggttgtgttgtttagagttggattttctgtagaaatctttctagagctctgatgtgactccagacactttatcgtttttcttttttttgagacggagttttgctcttgttgcccaggctagagtgcagtggtacaatcttggctcactgcaacctttgcctcccaggttgaagtgattctcatgcctcagcctcttgagtagctgggattagaggcaggtgccaccatgcctagctaatttttgtatttttagttagagacagggtttcaccatgttggccaggctagtctcgaacttctgacctcaggtgatccccctgccttggcctcccaaagttctgggattacaggggtgaaccactgtgcctggcccatttttctttataaatattgtaacataatgttttatagacaaacattcaagggtactttggctttaagaacttcaggatttctggtgctagaaaagcgcttgaagcagtatcaccaagattttagatattaaaaagtctggtgtaccagacattgagtcataatcatctatattcaagggatactttcattgataactttgttattatgctgcccttcacagaagacaacgtccggggcaggatcacatgctccctagcagatgctgatcagtgatgtcatagaaattacatgaatgcattgtctttaaatagcagtttaaccatgttataatgtaggctttttgtcttgttccgggctggtatttgggtgccctgattgaattacttggatttaaacagcaaactgtgggctctcgacttacatagtaagggcctttactgtttctttgtaggaaatgggtttctcgcctttgaaacattttttccccttttgtagtgacagtgccactaaatagttcagcttttgtcagtcccccaggaaagtgctatcctatggcctaactagccaagccttttttctttcatttaaaagaaattagctttaatttttacctttaattacttattcaaataagacagaaatatattttccttgcaataattaaaacattgcatataggccataaatttccttattttctctgaacgatcctgattccagtcatcttgttgaataccctagttctaataattgactcttgcttttctagagaaatatttccaaatgatgctagttttgtctcttcctttcaaagttgtataccacttctttttcttgtcattttgcattgcctgggacctccagaataatgtttcatgaagtagcatgtatccatatctggttcttgactttttcatcataataattgttttctatgggttacttatcagtttaagaatgcttaattcctagatgaactaagagtgtttattacatgttgagatttatggtatgctttttcttcctcaagataatgcattttttgtattatctgttaatgtgataggttatccatttgtgtattttcaatcattgaacaacccttgatttttttggataaactctatttggtcattatgcatcattctataaaccctgctgaatttttcatttgccaacatcttatttcagattcttttaatctgtgtccaacaatgagatttgttttcttttgcaatttgttttgaatttttggtatcagagctatactaaccttataatggaaaatacatatttctcaaacttttacactgatatattcatagtatttttttataatttgaaaaatcttgtcagtatctgtattaaggcctccatttcagttctgctatttcatattgccttaggttgtctatttgtctctttaatgaacccgattttgattttgtcatttttaaaataaacacatttatgctataaacttccttaatt

SEQ ID NO: 156 - protein, 755 aa, Homo sapiens
MPPFLLLEAVCVFLFSRVPPSLPLQEVHVSKETIGKISAASKMMWCSAAVDIMFLLDGSNSVGKGSFERSKHFAITVCDGLDISPERVRVGAFQFSSTPHLEFPLDSFSTQQEVKARIKRMVFKGGRTETELALKYLLHRGLPGGRNASVPQILIIVTDGKSQGDVALPSKQLKERGVTVFAVGVRFPRWEELHALASEPRGQHVLLAEQVEDATNGLFSTLSSSAICSSATPDCRVEAHPCEHRTLEMVREFAGNAPCWRGSRRTLAVLAAHCPFYSWKRVFLTHPATCYRTTCPGPCDSQPCQNGGTCVPEGLDGYQCLCPLAFGGEANCALKLSLECRVDLLFLLDSSAGTTLDGFLRAKVFVKRFVRAVLSEDSRARVGVATYSRELLVAVPVGEYQDVPDLVWSLDGIPFRGGPTLTGSALRQAAERGFGSATRTGQDRPRRVVVLLTESHSEDEVAGPARHARARELLLLGVGSEAVRAELEEITGSPKHVMVYSDPQDLFNQIPELQGKLCSRQRPGCRTQALDLVFMLDTSASVGPENFAQMQSFVRSCALQFEVNPDVTQVGLVVYGSQVQTAFGLDTKPTRAAMLRAISQAPYLGGVGSAGTALLHIYDKVMTVQRGARPGVPKAVVVLTGGRGAEDAAVPAQKLRNNGISVLVVGVGPVLSEGLRRLAGPRDSLIHVAAYADLRYHQDVLIEWLCGEAKQPVNLCKPSPCMNEGSCVLQNGSYRCKCRDGWEGPHCENRFLRRP

SEQ ID NO: 157 - DNA, 1860 bp, Homo sapiens
atgccagaccccgcggcgcacctgcccttcttctacggcagcatctcgcgtgccgaggccgaggagcacctgaagctggcgggcatggcggacgggctcttcctgctgcgccagtgcctgcgctcgctgggcggctatgtgctgtcgctcgtgcacgatgtgcgcttccaccactttcccatcgagcgccagctcaacggcacctacgccattgccggcggcaaagcgcactgtggaccggcagagctctgcgagttctactcgcgcgaccccgacgggctgccctgcaacctgcgcaagccgtgcaaccggccgtcgggcctcgagccgcagccgggggtcttcgactgcctgcgagacgccatggtgcgtgactacgtgcgccagacgtggaagctggagggcgaggccctggagcaggccatcatcagccaggccccgcaggtggagaagctcattgctacgacggcccacgagcggatgccctggtaccacagcagcctgacgcgtgaggaggccgagcgcaaactttactctggggcgcagaccgacggcaagttcctgctgaggccgcggaaggagcagggcacatacgccctgtccctcatctatgggaagacggtgtaccactacctcatcagccaagacaaggcgggcaagtactgcattcccgagggcaccaagtttgacacgctctggcagctggtggagtatctgaagctgaaggcggacgggctcatctactgcctgaaggaggcctgccccaacagcagtgccagcaacgcctcaggggctgctgctcccacactcccagcccacccatccacgttgactcatcctcagagacgaatcgacaccctcaactcagatggatacacccctgagccagcacgcataacgtccccagacaaaccgcggccgatgcccatggacacgagcgtgtatgagagcccctacagcgacccagaggagctcaaggacaagaagctcttcctgaagcgcgataacctcctcatagctgacattgaacttggctgcggcaactttggctcagtgcgccagggcgtgtaccgcatgcgcaagaagcagatcgacgtggccatcaaggtgctgaagcagggcacggagaaggcagacacggaagagatgatgcgcgaggcgcagatcatgcaccagctggacaacccctacatcgtgcggctcattggcgtctgccaggccgaggccctcatgctggtcatggagatggctgggggcgggccgctgcacaagttcctggtcggcaagagggaggagatccctgtgagcaatgtggccgagctgctgcaccaggtgtccatggggatgaagtacctggaggagaagaactttgtgcaccgtgacctggcggcccgcaacgtcctgctggttaaccggcactacgccaagatcagcgactttggcctctccaaagcactgggtgccgacgacagctactacactgcccgctcagcagggaagtggccgctcaagtggtacgcacccgaatgcatcaacttccgcaagttctccagccgcagcgatgtctggagctatggggtcaccatgtgggaggccttgtcctacggccagaagccctacaagaagatgaaagggccggaggtcatggccttcatcgagcagggcaagcggatggagtgcccaccagagtgtccacccgaactgtacgcactcatgagtgactgctggatctacaagtgggaggatcgccccgacttcctgaccgtggagcagcgcatgcgagcctgttactacagcctggccagcaaggtggaagggcccccaggcagcacacagaaggctgaggctgcctgtgcctga

SEQ ID NO: 158 - DNA, 1468 bp, Homo sapiens
tgcatgctccagggacggcacccttgtctggggcaggtgcttgtgggggctgaggctgccttgctccccacacccctgcccctgacctgggagtgtaccgctgtgtgtgcccagcacgcataacgtccccagacaaaccgcggccgatgcccatggacacgagcgtgtatgagagcccctacagcgacccagaggagctcaaggacaagaagctcttcctgaagcgcgataacctcctcatagctgacattgaacttggctgcggcaactttggctcagtgcgccagggcgtgtaccgcatgcgcaagaagcagatcgacgtggccatcaaggtgctgaagcagggcacggagaaggcagacacggaagagatgatgcgcgaggcgcagatcatgcaccagctggacaacccctacatcgtgcggctcattggcgtctgccaggccgaggccctcatgctggtcatggagatggctgggggcgggccgctgcacaagttcctggtcggcaagagggaggagatccctgtgagcaatgtggccgagctgctgcaccaggtgtccatggggatgaagtacctggaggagaagaactttgtgcaccgtgacctggcggcccgcaacgtcctgctggttaaccggcactacgccaagatcagcgactttggcctctccaaagcactgggtgccgacgacagctactacactgcccgctcagcagggaagtggccgctcaagtggtacgcacccgaatgcatcaacttccgcaagttctccagccgcagcgatgtctggagctatggggtcaccatgtgggaggccttgtcctacggccagaagccctacaagaagatgaaagggccggaggtcatggccttcatcgagcagggcaagcggatggagtgcccaccagagtgtccacccgaactgtacgcactcatgagtgactgctggatctacaagtgggaggatcgccccgacttcctgaccgtggagcagcgcatgcgagcctgttactacagcctggccagcaaggtggaagggcccccaggcagcacacagaaggctgaggctgcctgtgcctgagctcccgctgcccaggggagccctccacgccggctcttccccaccctcagccccaccccaggtcctgcagtctggctgagccctgcttggttgtctccacacacagctgggctgtggtagggggtgtctcaggccacaccggccttgcattgcctgcctggccccctgtcctctctggctggggagcagggaggtccgggagggtgcggctgtgcagcctgtcctgggctggtggctcccggagggccctgagctgagggcattgcttacacggatgccttcccctgggccctgacattggagcctgggcatcctcaggtggtcaggcgtagatcaccagaataaacccagcttccctcttgaaaaaaaaaaaaaaaaaaaaa

SEQ ID NO: 159 - protein, 619 aa, Homo sapiens
MPDPAAHLPFFYGSISRAEAEEHLKLAGMADGLFLLRQCLRSLGGYVLSLVHDVRFHHFPIERQLNGTYAIAGGKAHCGPAELCEFYSRDPDGLPCNLRKPCNRPSGLEPQPGVFDCLRDAMVRDYVRQTWKLEGEALEQAIISQAPQVEKLIATTAHERMPWYHSSLTREEAERKLYSGAQTDGKFLLRPRKEQGTYALSLIYGKTVYHYLISQDKAGKYCIPEGTKFDTLWQLVEYLKLKADGLIYCLKEACPNSSASNASGAAAPTLPAHPSTLTHPQRRIDTLNSDGYTPEPARITSPDKPRPMPMDTSVYESPYSDPEELKDKKLFLKRDNLLIADIELGCGNFGSVRQGVYRMRKKQIDVAIKVLKQGTEKADTEEMMREAQIMHQLDNPYIVRLIGVCQAEALMLVMEMAGGGPLHKFLVGKREEIPVSNVAELLHQVSMGMKYLEEKNFVHRDLAARNVLLVNRHYAKISDFGLSKALGADDSYYTARSAGKWPLKWYAPECINFRKFSSRSDVWSYGVTMWEALSYGQKPYKKMKGPEVMAFIEQGKRMECPPECPPELYALMSDCWIYKWEDRPDFLTVEQRMRACYYSLASKVEGPPGSTQKAEAACA

SEQ ID NO: 160 - protein, 312 aa, Homo sapiens
MPMDTSVYESPYSDPEELKDKKLFLKRDNLLIADIELGCGNFGSVRQGVYRMRKKQIDVAIKVLKQGTEKADTEEMMREAQIMHQLDNPYIVRLIGVCQAEALMLVMEMAGGGPLHKFLVGKREEIPVSNVAELLHQVSMGMKYLEEKNFVHRDLAARNVLLVNRHYAKISDFGLSKALGADDSYYTARSAGKWPLKWYAPECINFRKFSSRSDVWSYGVTMWEALSYGQKPYKKMKGPEVMAFIEQGKRMECPPECPPELYALMSDCWIYKWEDRPDFLTVEQRMRACYYSLASKVEGPPGSTQKAEAACA

SEQ ID NO: 161 - DNA, 2142 bp, Homo sapiens
agagctgcaagaagcaccaggctcggccacttcagaagccccagcctcgacctagcccaccctctcagggccacagtgcagaagcctgcacacctgccaagtctctccgactccttgcagctgctgtcagcatggcccaggctcctgctgacccgggcagagaaggccaccttgaacaaagaatcctgcaggtgctgacagaggctggctccccggtgaaacttgcccagctggtgaaggaatgccaagcacccaagagggagctcaaccaagtcctctaccgaatgaaaaaggagttgaaagtctccctcacatcccctgccacctggtgcttgggcgggactgatcctgaaggcgagggtcctgcagagctggccttgtccagccctgccgagaggccccagcaacatgcagctacaattccagagacccctggccctcagttcagccaacaacgggaggaagacatctacaggtttctcaaagacaatggtccccagagggccctggtcatcgcccaagcactgggaatgaggacagcaaaagatgtgaaccgagacttgtacaggatgaagagcaggcaccttctggacatggatgagcagtccaaagcatggacgatttaccgcccagaagattctggaagaagagcaaagtcagcctcaattatttaccagcacaatccaatcaacatgatctgccagaatggacccaacagctggatttccattgcaaactccgaagccatccagattggacacgggaacatcattacaagacagacagtctccagggaggacggttccgccggtccacgccacctcccttcaatggcaccaggtgattcctcaacttgggggaccctagttgatccctgggggccccaggacatccacatggagcagtccatactgagacgggtgcagctgggacacagcaatgagatgaggctccacggcgtcccgtccgagggccctgcccacatcccccctggcagccccccagtctctgccactgctgccggcccagaagcttcgtttgaagcaagaattcccagtccaggaactcaccctgagggggaagccgcccagagaatccacatgaaatcgtgctttctcgaggacgccaccatcggcaacagcaacaaaatgtctatcagcccaggggtggctggcccaggaggagtcgcagggtctggagagggggagccaggggaggacgcaggtcgtcgtcccgcagacacacaatccagaagtcactttcctcgagacattggtcagcccatcactcccagccactcgaagctcacccccaagctggaaactatgactcttggaaacaggagtcacaaagctgcagaaggcagccactatgtggatgaagcctcacacgaggggagctggtggggaggtgggatttagtgcacagcctcacgtggggcttggacacaggctgggggtgggcgcatgctagggagactagcctgctgctctctgcattccttagcgtcttgtttgacctgcttgcttccagacataacctgcatgaatcagttttgggggaatggacctggcatggggatgggttcaggccaggtcttttgatggccaggagtagatgacagggagttgccttggggaacctttggtgtgccaagaggaggtgggtagatgggagtggggctcggtcccccaggcccaggggactctctccactctttcctgggctcggggcatctgcctggagttaccttccatcatggctacctgctgtggtttgaatgtttgagtcccaacaaaattcatatcaaaacataatcccaactgggtgcagtggctcacgcctgtaatcccagcactttgggaggccgaggcgggcggatcaataggtcaggaaatccagaccgtcctggctaacatggtgaaaccccgtctctactaaaaaaaaaaatacaaaaaattagccgggcgttgtggcgggcacctggagtcccagctactccggaggctgagggaggagaatggtgtgaacccgggaggtggagcttccagtgagccgagatcgcgccactgcactccaggctgggcgacagagcgagactccgtctcaaaaaaataaatacataaataaaaaataaaccaa

SEQ ID NO: 162 - DNA, 1917 bp, Homo sapiens
agagctgcaagaagcaccaggctcggccacttcagaagccccagcctcgacctagcccaccctctcagggccacagtgcagaagcctgcacacctgccaagtctctccgactccttgcagctgctgtcagcatggcccaggctcctgctgacccgggcagagaagccgagaggccccagcaacatgcagctacaattccagagacccctggccctcagttcagccaacaacgggaggaagacatctacaggtttctcaaagacaatggtccccagagggccctggtcatcgcccaagcactgggaatgaggacagcaaaagatgtgaaccgagacttgtacaggatgaagagcaggcaccttctggacatggatgagcagtccaaagcatggacgatttaccgcccagaagattctggaagaagagcaaagtcagcctcaattatttaccagcacaatccaatcaacatgatctgccagaatggacccaacagctggatttccattgcaaactccgaagccatccagattggacacgggaacatcattacaagacagacagtctccagggaggacggttccgccggtccacgccacctcccttcaatggcaccaggtgattcctcaacttgggggaccctagttgatccctgggggccccaggacatccacatggagcagtccatactgagacgggtgcagctgggacacagcaatgagatgaggctccacggcgtcccgtccgagggccctgcccacatcccccctggcagccccccagtctctgccactgctgccggcccagaagcttcgtttgaagcaagaattcccagtccaggaactcaccctgagggggaagccgcccagagaatccacatgaaatcgtgctttctcgaggacgccaccatcggcaacagcaacaaaatgtctatcagcccaggggtggctggcccaggaggagtcgcagggtctggagagggggagccaggggaggacgcaggtcgtcgtcccgcagacacacaatccagaagtcactttcctcgagacattggtcagcccatcactcccagccactcgaagctcacccccaagctggaaactatgactcttggaaacaggagtcacaaagctgcagaaggcagccactatgtggatgaagcctcacacgaggggagctggtggggaggtgggatttagtgcacagcctcacgtggggcttggacacaggctgggggtgggcgcatgctagggagactagcctgctgctctctgcattccttagcgtcttgtttgacctgcttgcttccagacataacctgcatgaatcagttttgggggaatggacctggcatggggatgggttcaggccaggtcttttgatggccaggagtagatgacagggagttgccttggggaacctttggtgtgccaagaggaggtgggtagatgggagtggggctcggtcccccaggcccaggggactctctccactctttcctgggctcggggcatctgcctggagttaccttccatcatggctacctgctgtggtttgaatgtttgagtcccaacaaaattcatatcaaaacataatcccaactgggtgcagtggctcacgcctgtaatcccagcactttgggaggccgaggcgggcggatcaataggtcaggaaatccagaccgtcctggctaacatggtgaaaccccgtctctactaaaaaaaaaaatacaaaaaattagccgggcgttgtggcgggcacctggagtcccagctactccggaggctgagggaggagaatggtgtgaacccgggaggtggagcttccagtgagccgagatcgcgccactgcactccaggctgggcgacagagcgagactccgtctcaaaaaaataaatacataaataaaaaataaaccaa

SEQ ID NO: 163 - DNA, 1255 bp, Homo sapiens
tttttttttctttcaaaagacgaacagagaagtttcattttctttttctcctgaaaccgaatctggccggcctggctaggcatctatttccgggctgtaagcagctgacacctgcccagtggaagctggcatccctccccttgtgggttcagagctgcaagaagcaccaggctcggccacttcagaagccccagcctcgacctagcccaccctctcagggccacagtgcagaagcctgcacacctgccaagtctctccgactccttgcagctgctgtcagcatggcccaggctcctgctgacccgggcagagaaggccaccttgaacaaagaatcctgcaggtgctgacagaggctggctccccggtgaaacttgcccagctggtgaaggaatgccaagcacccaagagggagctcaaccaagtcctctaccgaatgaaaaaggagttgaaagtctccctcacatcccctgccacctggtgcttgggcgggactgatcctgaaggcgagggtcctgcagagctggccttgtccagccctgccgagaggccccagcaacatgcagctacaattccagagacccctggccctcagttcagccaacaacgggaggaagacatctacaggtttctcaaagacaatggtccccagagggccctggtcatcgcccaagcactgggaatgaggacagcaaaagatgtgaaccgagacttgtacaggatgaagagcaggcaccttctggacatggatgagcagtccaaagcatggacgatttaccgcccagaagattctggaagaagagcaaagtcagcctcaattatttaccagcacaatccaatcaacatgatctgccagaatggacccaacagctggatttccattgcaaactccgaagccatccagattggacacgggaacatcattacaagacagacagtctccagggaggacggtaagtcacccaagagagcccagggaggggacctcggtggggagccaccggatcctctgggtgggggcaaagggtagggatggggagtggggggattctgccctccaaggggaaagggttgcttccagacccccacagtccacctttacggccgtcctgagaatgaggacacctggatcaaagctctcctgatttccctgtactctgatactttctacctcattttaaagtttaatttaatttttatttttctaataaaattttaaaattaagatgggaaaaaaaaaaaaaaaaaaaaaaaaaa

SEQ ID NO: 164 - protein, 429 aa, Homo sapiens
MAQAPADPGREGHLEQRILQVLTEAGSPVKLAQLVKECQAPKRELNQVLYRMKKELKVSLTSPATWCLGGTDPEGEGPAELALSSPAERPQQHAATIPETPGPQFSQQREEDIYRFLKDNGPQRALVIAQALGMRTAKDVNRDLYRMKSRHLLDMDEQSKAWTIYRPEDSGRRAKSASIIYQHNPINMICQNGPNSWISIANSEAIQIGHGNIITRQTVSREDGSAGPRHLPSMAPGDSSTWGTLVDPWGPQDIHMEQSILRRVQLGHSNEMRLHGVPSEGPAHIPPGSPPVSATAAGPEASFEARIPSPGTHPEGEAAQRIHMKSCFLEDATIGNSNKMSISPGVAGPGGVAGSGEGEPGEDAGRRPADTQSRSHFPRDIGQPITPSHSKLTPKLETMTLGNRSHKAAEGSHYVDEASHEGSWWGGGI

SEQ ID NO: 165 - protein, 354 aa, Homo sapiens
MAQAPADPGREAERPQQHAATIPETPGPQFSQQREEDIYRFLKDNGPQRALVIAQALGMRTAKDVNRDLYRMKSRHLLDMDEQSKAWTIYRPEDSGRRAKSASIIYQHNPINMICQNGPNSWISIANSEAIQIGHGNIITRQTVSREDGSAGPRHLPSMAPGDSSTWGTLVDPWGPQDIHMEQSILRRVQLGHSNEMRLHGVPSEGPAHIPPGSPPVSATAAGPEASFEARIPSPGTHPEGEAAQRIHMKSCFLEDATIGNSNKMSISPGVAGPGGVAGSGEGEPGEDAGRRPADTQSRSHFPRDIGQPITPSHSKLTPKLETMTLGNRSHKAAEGSHYVDEASHEGSWWGGGI

SEQ ID NO: 166 - protein, 248 aa, Homo sapiens
MAQAPADPGREGHLEQRILQVLTEAGSPVKLAQLVKECQAPKRELNQVLYRMKKELKVSLTSPATWCLGGTDPEGEGPAELALSSPAERPQQHAATIPETPGPQFSQQREEDIYRFLKDNGPQRALVIAQALGMRTAKDVNRDLYRMKSRHLLDMDEQSKAWTIYRPEDSGRRAKSASIIYQHNPINMICQNGPNSWISIANSEAIQIGHGNIITRQTVSREDGKSPKRAQGGDLGGEPPDPLGGGKG
